(19) United States
(12) Patent Application Publication
(10) Pub. No.: US 2020/0347104 A1
(43) Pub. Date: Nov. 5, 2020

(54) WHEAT COMPRISING MALE FERTILITY RESTORER ALLELES

(71) Applicants: VILMORIN & CIE, Paris (FR); LIMAGRAIN EUROPE, Saint Beauzire (FR)

(72) Inventors: Pierrick VARENNE, Fontainebleau (FR); Jordi COMADRAN, Riom (FR); Sébastien SPECEL, Montpensier (FR); Alain MURIGNEUX, La Roche Blanche (FR); Joanna MELONEK, Crawley (AU); Ian SMALL, Wattle Grove (AU); Pascual PEREZ, Chanonat (FR); Jorge DUARTE, Clermont Ferrand (FR); Jean-Philippe PICHON, Clermont Ferrand (FR); Sylvain LEVADOUX, Clermont Ferrand (FR); Jérôme MARTIN, Volvic (FR); François TORNEY, Mahomet, IL (US)

(73) Assignees: VILMORIN & CIE, Paris (FR); LIMAGRAIN EUROPE, Saint Beauzire (FR)

(21) Appl. No.: 16/760,693

(22) PCT Filed: Oct. 31, 2018
(86) PCT No.: PCT/EP2018/079816

§ 371 Date: Apr. 30, 2020

(30) Foreign Application Priority Data
Oct. 31, 2017 (EP) 17306500.4
Oct. 31, 2017 (EP) 17306501.2
Jan. 12, 2018 (EP) 18305027.7
Aug. 14, 2018 (EP) 18306114.2

(51) Int. Cl. C07K 14/415; C12N 15/82

(52) U.S. Cl. CPC C07K 14/415; C12N 15/8289

(57) ABSTRACT

A wheat transgenic plant carrying restorer of fertility genes specific to T. timopheevii CMS cytoplasm.

[0001] The invention is in the field of plant genetics and plant breeding. The invention more specifically relates to wheat plants carrying restorer of fertility genes specific to T. timopheevii CMS cytoplasm.

### BACKGROUND

[0002] Hybrid production is based on crossing two parental lines to increase heterosis and de facto, increase genetic variability to create new varieties or genotypes with higher yield and better adapted to environmental stresses. Even in a predominantly autogamous species like wheat, research studies have shown that hybrid lines exhibit improved quality and greater tolerance to environmental and biotic stresses.

[0003] In order to promote commercially viable rates of hybrid production, self-fertilization must be avoided, i.e. fertilization of the female organ by the pollen of the same plant. It is desired that the female organ of the female parent is exclusively fertilized with the pollen of the male parent. In order to obtain a reliable and efficient system for producing seeds needed for hybrid production, one generally needs three essential elements: a means to induce male sterility, a means to propagate the sterility, and a means to restore fertility. For example a fully genetically based system is composed of a male-sterile line (female parent), a fertile maintainer line (male parent allowing propagation of the male-sterile line), and a fertility restorer line (male parent for hybrid production).

[0004] Male sterility can be achieved by three different ways. Manual emasculation is the simplest one and is still used in some species where male and female flowers are separated, e.g. corn. However, it is impractical in species like wheat where flowers contain both female and male organs. Male sterility can also be induced by chemical hybridization agents (CHAs) with gametocidic effects. Currently, only a few commercial hybrid wheat cultivars are based on this technology as it can bear substantial financial risks.

[0005] Finally, male sterility can also be induced by genetic means. There are many examples of hybrid systems in corn or sorghum based on male sterility induced by genetic means showing the preponderance of this technology compared to the two mentioned previously. However, in other species which are predominantly self-pollinated like wheat, hybrid production is still a challenge (Longin et al, 2012).

[0006] The first case of male sterility in wheat was observed in 1951 (Kihara, 1951), where it was observed that sterility was caused by incompatibility between the cytoplasm of Aegilops caudata L. and the nucleus of T. aestivum var. erythrospermum. Subsequently research on T. timopheevii cytoplasm showed that this cytoplasm is able to induce sterility in bread wheat (T. aestivum) (Wilson and Ross, 1961, Crop Sci, 1: 191-193). Orf256 was previously identified as a gene specific to the T. timopheevii mitochondrial genome (Rathburn and Hedgcoth, 1991; Song and Hedgcoth, 1994), however, it remains to be shown that orf256 is the genetic determinant of T. timopheevii CMS. It was expected that such a cytoplasm could be used in a hybrid production system. However, major limitations arose from the difficulty in finding a completely dominant and stable fertility restorer gene with no negative side effects (notably on yield).

[0007] Fertility restoration of male sterile plants harboring T. timopheevii CMS cytoplasm (T-CMS cytoplasm) has been reported and eight major restorer loci (designated as Rf1 to Rf8) have been identified and located approximate within the wheat genome. One of the most effective restorer loci is Rf3 (Ma and Sorrells, 1995; Kojima et al, 1997; Ahmed et al 2001; Geyer et al 2016). Two SNP markers allowed the location of the Rf3 locus within a 2 cM fragment on chromosome 1B (Geyer et al, 2016). The author notes that these markers are not diagnostic markers.

[0008] While it is understood that restoration to normal pollen fertility could require two or more Rf loci, it is also well known that modifier loci exist that have either minor effects with low penetrance (Zhou et al 2005, Stojalowski et al 2013) or inhibitory effects on fertility, depending on environmental conditions (Wilson, 1984). It is not yet understood which combination of genes or loci is needed to complete a full restoration of T-CMS in different genetic backgrounds and environmental conditions.

[0009] In this context, the development of technologies that enable a full restoration of pollen fertility is of major importance in wheat. It is therefore the object of this invention to propose suitable fertility restorer genes in wheat for the development of a hybrid production system useful for the seed industry.

### SUMMARY

[0010] A first object of the present disclosure relates to an isolated Rf1 nucleic acid encoding a Rf1 protein restorer of fertility of T. timopheevii CMS cytoplasm, wherein the corresponding amino acid sequence has at least 95% identity, preferably at least 96%, 97%, 98%, 99% or 100% identity to SEQ ID NO:361. An example of Rf1 nucleic acid comprises SEQ ID NO:3119.

[0011] The disclosure also relates to a transgenic wheat plant comprising such Rf1 nucleic acid, and, optionally, one or more nucleic acids comprising Rf3, Rf4 and/or Rf7 restorer allele(s), as transgenic element(s).

[0012] Another aspect relates to a genetically engineered wheat plant comprising such Rf1 nucleic acid, and, optionally, one or more nucleic acids comprising Rf3, Rf4 and/or Rf7 restorer allele(s), as genetically engineered element(s).

[0013] In specific embodiments, said transgenic element(s) or genetically engineered element(s) express polypeptides which restore or improve male fertility to the plant as compared to the parent plant without such transgenic element(s) or genetically engineered element(s).

[0014] Yet another aspect relates to a wheat plant restorer of fertility of T. timopheevii CMS cytoplasm comprising such Rf1 restorer allele, and at least two fertility restorer alleles within the restorer loci chosen amongst Rf3, Rf4 and Rf7, wherein,
[0015] the Rf3 locus is located at most 10 cM from marker cfn1249269 of SEQ ID NO:3205 or marker BS00090770 of SEQ ID NO:3228,
[0016] the Rf7 locus is located at most 10 cM from marker cfn0919993 of SEQ ID NO:3231, and,
[0017] the Rf4 locus is located at most 10 cM from marker cfn0393953 of SEQ ID NO:3233.

[0018] The disclosure also provides methods for producing a transgenic wheat plant as described above, wherein the method comprises the steps of transforming a parent wheat plant with one or more Rf1 nucleic acids encoding protein restorer of T. timopheevii CMS cytoplasm, selecting a plant comprising said one or more nucleic acid(s) as transgene(s), regenerating and growing said wheat transgenic plant.

[0019] Also part of the present disclosure is a method for producing a genetically modified wheat plant as described above, wherein the method comprises the steps of genetically modifying a parent wheat plant to obtain in their genome one or more nucleotide sequence encoding Rf1 protein restorer of T. timopheevii CMS cytoplasm, preferably by genome-editing, selecting a plant comprising said one or more nucleotide sequences as genetically engineered elements, regenerating and growing said wheat genetically engineered plant.

[0020] The disclosure further relates to a method for producing a wheat plant by crossing, said method includes the following:
[0021] providing a first wheat plant comprising one or two restorer allele selected among Rf1, Rf3 and Rf7 restorer alleles,
[0022] crossing said first wheat plant with a second wheat plant comprising one or two restorer alleles selected among Rf1, Rf3 and Rf7 restorer alleles, wherein Rf1, Rf3 and Rf7 restorer alleles are represented at least once in the panel of restorer alleles provided by the first plant and the second plant,
[0023] collecting the F1 hybrid seed,
[0024] obtaining homozygous plants from the F1 plants,
[0025] optionally detecting the presence of the Rf1, Rf3 and Rf7 restorer alleles in the hybrid seed and/or at each generation.

[0026] Preferably in such methods, the fertility score of the obtained wheat plant has a fertility score higher than the parent wheat plant.

[0027] The disclosure also relates to a method for producing a transgenic or genetically engineered wheat plant, wherein the fertility level of said plant is modified, comprising the step of knocking-down Rf1 restorer allele expression, wherein said Rf1 restorer allele comprises a Rf1 nucleic acid.

[0028] The disclosure also relates to the method for producing a wheat hybrid plant comprising the steps of:
[0029] crossing a sterile female comprising the T. timopheevii cytoplasm with a fertile male wheat plant as described above;
[0030] collecting the hybrid seed;
[0031] optionally detecting hybridity level of the hybrid seeds.

[0032] The wheat hybrid plant as obtained by the above methods are also part of the present disclosure.

[0033] The present disclosure also relates to a method of identifying a wheat plant as described above, wherein said wheat plant is identified by detecting the presence of at least one restorer allele Rf1 and, optionally, one or more further restorer alleles selected from the group consisting of Rf3, Rf4 and Rf7.

[0034] Accordingly, nucleic acid probes or primers for the specific detection of the restorer allele Rf1 in a wheat plant, and, optionally, one or more of the Rf3, Rf4, and Rf7 restorer alleles, are also disclosed herein.

[0035] Another aspect of the disclosure relates to a recombinant nucleic acid comprising a Rf1 nucleic acid encoding a Rf1 protein restorer of T. timopheevii CMS cytoplasm, operably linked to regulatory elements and the vectors for use in transformation of a wheat plant, comprising such recombinant nucleic acids.

### DETAILED DESCRIPTION

[0036] Nucleic Acids of the Present Disclosure

[0037] An aspect of the present disclosure relates to the cloning and characterization of genes encoding restorer of fertility proteins that act on T. timopheevi CMS cytoplasm (hereafter referred as Rf genes or nucleic acids) in wheat plants and the use of the corresponding Rf nucleic acids for producing transgenic wheat plants, for modifying wheat plants by genome editing, and/or for detecting such Rf genes in wheat plants.

[0038] Whenever reference to a “plant” or “plants” is made, it is understood that also plant parts (cells, tissues or organs, seed pods, seeds, severed parts such as roots, leaves, flowers, pollen, etc.), progeny of the plants which retain the distinguishing characteristics of the parents (especially, male fertility associated with the claimed Rf nucleic acids), such as seed obtained by selfing or crossing, e.g. hybrid seeds (obtained by crossing two inbred parent plants), hybrid plants and plant parts derived therefrom are encompassed herein, unless otherwise indicated.

[0039] As used herein, the term “wheat plant” refers to species of the genus Triticum as for example, T. aestivum, T. aethiopicum, T. araraticum, T. boeoticum, T. carthlicum, T. cornpactum, T. dicoccoides, T. dicoccon, T. durum, T. ispahanicum, T. karamyschevii, T. macha, T. militinae, T. monococcum, T. polonicum, T. spelta, T. sphaerococcum, T. timopheevii, T. turanicum, T. turgidum, T. urartu, T. vavilovii, T. zhukovskyi Faegi. Wheat plant also refers to species of the genera Aegilops and Triticale.

[0040] As used herein, the term “restorer of fertility of T. timopheevi CMS cytoplasm” refers to a protein whose expression in a wheat plant comprising T. timopheevi CMS cytoplasm contributes to the restoration of the production of pollen in the Triticum timopheevii CMS system.

[0041] As used herein, the term “allele(s)” means any of one or more alternative forms of a gene at a particular locus. In a diploid, alleles of a given gene are located at a specific location or locus on a chromosome. One allele is present on each chromosome of the pair of homologous chromosomes. The same definition is used for plants bearing a higher level of ploidy like in Triticum gender wherein, for example, T. aestivum is an hexaploid plant.

[0042] As used herein, the term “restorer allele of T. timopheevi CMS cytoplasm” refers to an allele which contributes to the restoration of the production of pollen in the CMS Triticum timopheevii system.

[0043] The restoration of pollen fertility may be partial or complete. The pollen fertility can be evaluated by the pollen fertility tests as described in the Examples below. In particular, the fertility score of F1 wheat plants having CMS-T timopheevii cytoplasm (from test restorer line with CMS hybrids) may be calculated by dividing the total number of seeds threshed from a spike by the number of counted spikelets and may be compared with the fertility scores of a panel of control fertile plants, for example elite inbred lines bearing a normal wheat cytoplasm, grown in the same area and under the same agro-environmental conditions. It is preferred that such panels of lines comprise a set of at least 5 elite inbred lines wherein these lines are representative of the area where the fertility test is achieved. Besides, it is preferred that at least 10 spikes from different individual F1 plants be assessed for a given experiment.

[0044] If the fertility score is not null, then the plant has acquired partial or full restoration of fertility. For each fertility score, a statistical test is calculated to obtain a p-value. Examples of statistical tests are the Anova or mean comparison tests. A p-value below a 5% threshold will indicate that the two distributions are statistically different. Therefore, a significant decrease of the fertility score of the tested wheat plant as compared to the fertility score of the fully fertile control plant is indicative that the F1 plant has not acquired full restoration of fertility (i.e. partial restoration). A similar or higher fertility score is indicative that the F1 plant has acquired full restoration of fertility. In a preferred embodiment, the wheat plant, such as transgenic or genetically engineered wheat plant, according to the present disclosure, has acquired full restoration of fertility.

[0045] The loci of the restorer alleles of T. timopheevi CMS cytoplasm within Rf1, Rf3, Rf4 and Rf7 have been mapped in the present disclosure. The corresponding restorer alleles are designated Rf1, Rf3, Rf4 and Rf7 restorer alleles and have been described in the art. In particular, a wheat plant source of the Rf3 restorer allele includes the commercial following lines: Allezy, Altigo, Altamira, see table 15. A wheat plant source of the Rf4 restorer allele includes the following lines: R113 or L13.

[0046] In specific embodiments, representative alleles of Rf1, Rf3, Rf4 and Rf7 restorer alleles are provided by the seed sample chosen amongst: NCIMB 42811, NCIMB 42812, NCIMB 42813, NCIMB 42814, NCIMB 42815, NCIMB 42816, and NCIMB 42817.

[0047] As used herein, the term “centimorgan” (“cM”) is a unit of measure of recombination frequency. One cM is equal to a 1% chance that a marker at one genetic locus will be separated from a marker at a second locus due to crossing over in a single generation.

[0048] As used herein, the term “chromosomal interval” designates a contiguous linear span of genomic DNA that resides in planta on a single chromosome. The genetic elements or genes located on a single chromosomal interval are physically linked. The size of a chromosomal interval is not particularly limited. In some aspects, the genetic elements located within a single chromosomal interval are genetically linked, typically with a genetic recombination distance of, for example, less than or equal to 20 cM, or alternatively, less than or equal to 10 cM. That is, two genetic elements within a single chromosomal interval undergo recombination at a frequency of less than or equal to 20% or 10%.

[0049] The present disclosure provides nucleic acids and their recombinant forms comprising the coding sequence of either Rf1, Rf3, Rf4, Rf7 or Rf-rye restorer of fertility proteins active in T. timopheevii CMS cytoplasm.

[0050] As used herein, a “recombinant nucleic acid” is a nucleic acid molecule, preferably a DNA molecule, comprising a combination of nucleic acid molecules that would not naturally occur together and is the result of human intervention, e.g., a DNA molecule that is comprised of a combination of at least two DNA molecules heterologous to each other, and/or a DNA molecule that is artificially synthesized and comprises a polynucleotide sequence that deviates from the polynucleotide sequence that would normally exist in nature.

[0051] Such nucleic acids encoding candidate restorer of fertility proteins of T. timopheevii CMS cytoplasm have been isolated as described in the Examples below. Accordingly, a first aspect of the disclosure are nucleic acids encoding a protein restorer of fertility of T. timopheevii having an amino acid sequence at least 95% identical, typically at least 96% identical, to an amino acid sequence chosen amongst any one of SEQ ID NO:1 to SEQ ID NO:1554.

[0052] Percentage of sequence identity as used herein is determined by calculating the number of matched positions in aligned amino acid sequences, dividing the number of matched positions by the total number of aligned amino acids, and multiplying by 100. A matched position refers to a position in which identical amino acids occur at the same position in aligned amino acid sequences. For example, amino acid sequences may be aligned using the CD-hit (settings -c 0.96 -n 5 -G 0 -d 0 -AS 60 -A 105 -g 1, see http://weizhongli-lab.org/cd-hit/).

[0053] The above candidate nucleic acids encoding any one of polypeptides SEQ ID NO: 1 to 1554, can further be assessed for their capacity to restore fertility of sterile wheat plant as described below.

[0054] It is therefore disclosed herein a method for assessing the capacity of a nucleic acid to restore fertility, wherein the method comprises the steps of:
[0055] a. introducing one or more candidate Rf1, Rf3, Rf4, Rf7 and/or Rf-rye nucleic acid encoding a putative amino acid sequence of at least 95% identical to any one of SEQ ID NO1 to SEQ ID NO1554 into a parent wheat sterile plant and T. timopheevii CMS cytoplasm,
[0056] b. selecting the transgenic plant bearing one or more candidate nucleic acid as transgene(s), and
[0057] c. evaluating the fertility of the transgenic plants as compared to the parent wheat sterile plant based on a fertility restoration assay,
[0058] wherein an improvement in the fertility restoration is indicative that said nucleic acid has the capacity to restore fertility.

[0059] In a specific embodiment, the parent wheat sterile plant is the Fielder line bearing the T. timopheevii CMS cytoplasm.

[0060] In another specific embodiment of the above method, the Rf1, Rf3, Rf4, Rf7 and/or Rf-rye candidate nucleic acid sequence is selected from those encoding an amino acid sequence having at least 95% identity, or at least 96% identity, for example 100% identity, to any one of SEQ ID NO1 to SEQ ID NO1554.

[0061] Typically, the Rf1, Rf3, Rf4, Rf7 and/or Rf-rye candidate nucleic acids are selected among the following nucleic acids of SEQ ID NO:1555 to SEQ ID NO:3107 and 3133.

[0062] In a further specific embodiment, where appropriate, the nucleic acid sequence may be optimized for increased expression in the transformed plant. There are a number of optimizations that can be performed at the DNA level, without changing the protein sequence, by conservative codon exchanges which replace one codon by another codon encoding the same amino acid. Besides, the nucleic acid sequence can be modified for cloning purpose. Like for optimization, such modification is achieved without changing the protein sequence.

[0063] Rf1 nucleic acids

[0064] In specific embodiment, the nucleic acid of the present disclosure is a Rf1 nucleic acid.

[0065] As used herein, the term “Rf1 nucleic acid” refers to a nucleic acid comprising a gene encoding a Rf1 protein restorer of fertility of T. timopheevii CMS cytoplasm, wherein the corresponding amino acid sequence has at least 95% identity, preferably, 96%, 97%, 98%, 99% or 100% identity to an amino acid sequence selected from the group consisting of SEQ ID NOs1-2, SEQ ID NOs288-290, SEQ ID NOs293-296, SEQ ID NOs343-346, SEQ ID NOs349-354, SEQ ID NOs359, 361 and 362, SEQ ID NOs 396 and 397, SEQ ID NOs428-430, SEQ ID NO517 and 519, SEQ ID NOs752-754, SEQ ID NOs1092, 1093 and 1095, typically, SEQ ID NOs359, 361 and 362 and SEQ ID NO428-430. In a particularly preferred embodiment, the Rf1 nucleic acid encodes an amino acid sequence having at least 95% identity, preferably, 96%, 97%, 98%, 99% or 100% identity to SEQ ID NO:361. Examples of corresponding specific Rf1 nucleic acids are referred to in Table 7.

[0066] In particular, and as shown in Example 6, the inventors have identified that RFL79 sequence of SEQ ID NO:361 (as depicted in Table 7) can restore male fertility of CMS-Fielder plants. Accordingly, in a preferred embodiment, examples of Rf1 nucleic acids comprises the disclosed Rf1 nucleic acid sequences of SEQ ID NO:1913, SEQ ID NO:1914, SEQ ID NO:1915, SEQ ID NO:1916 or SEQ ID NO:3119, preferably a Rf1 nucleic acid comprises SEQ ID NO:3119.

[0067] Rf3 Nucleic Acids

[0068] In specific embodiment, the nucleic acid of the present disclosure is a Rf3 nucleic acid.

[0069] As used herein, the term “Rf3 nucleic acid” refers to a nucleic acid comprising a gene encoding a Rf3 protein restorer of fertility of T. timopheevii CMS cytoplasm, wherein the corresponding amino acid sequence has at least 95% identity, preferably, 96%, 97%, 98%, 99% or 100% identity to an amino acid sequence selected from the group consisting of SEQ ID NOs:124 and 125, SEQ ID NO:147, SEQ ID NO:150, SEQ ID NO:156, SEQ ID NO:158, SEQ ID NO:297, SEQ ID NO:299, SEQ ID NOs:315-321, SEQ ID NOs:379-381, SEQ ID NOs:553 and 554, SEQ ID NOs:557 and 558, SEQ ID NOs:676 and 677, SEQ ID NOs:684 and 685, SEQ ID NOs:696 and 697, SEQ ID NOs:938 and 939 and SEQ ID NOs:1038 and 1039, typically, SEQ ID NOs:315-321, SEQ ID NOs:379-381, SEQ ID NOs:147 and 150, SEQ ID NOs:156 and 158, SEQ ID NOs297 and 299. Preferred Rf3 nucleic acids encode a Rf3 protein restorer of fertility of T. timopheevii CMS cytoplasm, with the corresponding amino acid sequence having at least 95% identity, preferably, 96%, 97%, 98%, 99% or 100% identity to an amino acid sequence selected from the group consisting of SEQ ID NO:158, SEQ ID NO:676 and SEQ ID NO:684. Examples of corresponding specific Rf3 nucleic acids are referred to in Table 7 or further described in Example 12. Typically, examples of specific Rf3 nucleic acids comprises SEQ ID NO:1712, SEQ ID NO:2230, SEQ ID NO:2238, SEQ ID NO:3146, SEQ ID NO:3147 or SEQ ID NO:3148.

[0070] Rf4 Nucleic Acids

[0071] In specific embodiment, the nucleic acid of the present disclosure is a Rf4 nucleic acid.

[0072] As used herein, the term “Rf4 nucleic acid” refers to a nucleic acid comprising a gene encoding a Rf4 protein restorer of fertility of T. timopheevii CMS cytoplasm, wherein the corresponding amino acid sequence has at least 95% identity, preferably, 96%, 97%, 98%, 99% or 100% identity to an amino acid sequence selected from the group consisting of SEQ ID NO:477, and SEQ ID NOs3135-3138, typically SEQ ID NO:477 and SEQ ID NOs3136-3138. Examples of corresponding specific Rf4 nucleic acids are listed in Table 7 and further include any of SEQ ID NO: 2031, and SEQ ID NO:3140-3142.

[0073] Rf7 Nucleic Acids

[0074] In specific embodiment, the nucleic acid of the present disclosure is a Rf7 nucleic acid.

[0075] As used herein, the term “Rf7 nucleic acid” refers to a nucleic acid comprising a gene encoding a Rf7 protein restorer of fertility of T. timopheevii CMS cytoplasm, wherein the corresponding amino acid sequence has at least 95% identity, preferably, 96%, 97%, 98%, 99% or 100% identity to an amino acid sequence selected from the group consisting of SEQ ID NOs:240-243, SEQ ID NOs303-305, SEQ ID NO:363, SEQ ID NOs375-377, SEQ ID NOs497-499, SEQ ID NO:516, SEQ ID NOs709-711, SEQ ID NO:768, typically SEQ ID NO:363, SEQ ID NO:516 and SEQ ID NO:768. Examples of corresponding specific Rf7 nucleic acids are referred to in Table 7.

[0076] Rf-Rye Nucleic Acids

[0077] In specific embodiment, the nucleic acid of the present disclosure is a Rf-rye nucleic acid.

[0078] As used herein, the term “Rf-rye nucleic acid” refers to a nucleic acid comprising a gene encoding a Rf-rye protein restorer of fertility of T. timopheevii CMS cytoplasm, wherein the corresponding amino acid sequence has at least 95% identity, preferably, 96%, 97%, 98%, 99% or 100% identity to an amino acid sequence selected from the group consisting of SEQ ID NO:227, SEQ ID NO:378 and SEQ ID NO:859. Examples of corresponding specific Rf-rye nucleic acids are referred to in Table 7.

[0079] Rf Nucleic Acids as Transgene

[0080] The present disclosure more specifically relates to DNA molecules including one or more of the Rf1, Rf3, Rf4, Rf7 or Rf-rye nucleic acids. In particular, the disclosure relates to any DNA molecule resulting from the insertion of a transgene in the wheat plant, said transgene including one or more of the above described Rf1, Rf3, Rf4, Rf7 or Rf-rye nucleic acids, and which insertion results in the expression of corresponding RNA and/or protein in the wheat plant.

[0081] Also part of the present disclosure is a nucleic acid that has been extracted from cells, or tissues, or homogenate from a plant or seed or plant tissue; or can be produced as an amplicon from extracted DNA or RNA from cells, or tissues, or homogenate from a plant or seed or plant tissue, any of which is derived from such materials derived from a plant comprising such nucleic acid as disclosed above.

[0082] As used herein, the term “transgene” or “transgenic element” refers to the nucleic acid (e.g. DNA molecule) incorporated into a host cell's genome. The term “transgene” or ‘transgenic element” refers in particular to a sequence that is not normally present in a given host genome in the genetic context in which the sequence is currently found. In this respect, the sequence may be native to the host genome, but be rearranged with respect to other genetic sequences within the host genomic sequence. For example, the transgene is rearranged at a different locus as compared to the native gene.

[0083] Said one or more transgenic element(s) enables the expression of polypeptides which restore or improve male fertility to the plant having T. timopheevii CMS cytoplasm, as compared to the parent plant which do not comprise the transgenic element.

[0084] A particular transgenic element is the recombinant nucleic acid as defined above, for example Rf1 nucleic acids as defined above. In specific embodiments, a transgenic element includes an Rf nucleic acid under the control of a constitutive promoter, such as the ZmUbi promoter.

[0085] Recombinant Nucleic Acids for Use in Transforming Wheat Plants

[0086] Such Rf nucleic acids as defined above are also useful to transform or genetically modify wheat plant, in particular wheat plant which does not have one or more of the fertility restoration alleles Rf1, Rf3, Rf4, Rf7 and Rf-rye.

[0087] Another aspect of the present disclosure relates to a vector for use in transforming wheat plant, comprising one or more of Rf1, Rf3, Rf4, Rf7 and Rf-rye nucleic acids as described above.

[0088] Vectors for use in transforming wheat plant includes at least the coding sequence of the corresponding protein restorer of fertility (either naturally occurring coding sequence, or improved sequence, such as codon optimized sequence), such coding sequence being operably linked to a regulatory element such as a promoter.

[0089] The term “promoter” as used herein refers to a region of DNA upstream of the coding sequence (upstream of start codon) and including DNA regions for recognition and binding of RNA polymerase and other proteins to initiate transcription at the start codon. Examples of constitutive promoters useful for expression include the 35S promoter or the 19S promoter (Kay et al, 1987), the rice actin promoter (McElroy et al, 1990), the pCRV promoter (Depigny-This et al, 1992), the CsVMV promoter (Verdaguer et al. 1996), the ubiquitin 1 promoter of maize (Christensen and Quail, 1996), the regulatory sequences of the T-DNA of Agrobacterium tumefaciens, including mannopine synthase, nopaline synthase, octopine synthase.

[0090] Promoters may be «tissue-preferred», i.e. initiating transcription in certain tissues or “tissue-specific”, i.e. initiating transcription only in certain tissues. Examples of such promoters are DHN12, LTR1, LTP1 specific of the embryo, SS1 specific of the phloem, OSG6B specific of the tapetum (Gotz et al 2011 and Jones 2015).

[0091] Other suitable promoters could be used. It could be an inducible promoter, a developmentally regulated promoter. An “inducible” promoter initiates transcription under some environmental control or any stress-induced like for example the abiotic stress-induced RD29, COR14b (Gotz et al, 2011).

[0092] Constitutive promoters may be used, such as the ZmUbi promoter, typically the ZmUbi promoter of SEQ ID NO:3134. Finally, promoter of SEQ ID NO:3114, SEQ ID NO:3123 and SEQ ID NO:3113 corresponding to pTaRFL46, 79 and 104 can also be used.

[0093] In specific embodiments, the Rf1, Rf3, Rf4, Rf7 or Rf-rye nucleic acids of the present disclosure are operably linked to heterologous promoters, i.e. a promoter which is not the natural promoter of the corresponding Rf1, Rf3, Rf4, Rf7 or Rf-rye nucleic acids as found in wheat. Typical recombinant constructs of Rf3 nucleic acids with heterologous promoters include any one of SEQ ID NO:3150-3153, and any one of SEQ ID NO:3156-SEQ ID NO:3159. Typical recombinant constructs of Rf1 nucleic acids with heterologous promoters includes SEQ ID NO:3122, or a nucleic acid of SEQ ID NO:3119 under the regulation of the promoter of SEQ ID NO:2123.

[0094] The vector may further comprise additional elements including selection gene marker, operably linked to regulatory element, that allows to select the transformed plant cells containing the vector, comprising the nucleic acids of the present disclosure as transgene.

[0095] The vector may further comprise additional elements including counter-selection gene marker, operably linked to regulatory element that allows to counter-select the transformed plant cells which do not have maintained the counter-selection gene marker in its genome.

[0096] In a specific embodiment, the vector according to the present disclosure may be vector suitable for Agrobacterium-mediated transformation, in particular Agrobacterium tumefaciens or Agrobacterium rhizogenes mediated transformation, as described in the next section.

[0097] Methods for Producing a Wheat Transgenic Plant

[0098] Another aspect of the present disclosure relates to the use of the above-described nucleic acids for producing wheat transgenic plant expressing protein restorer of fertility.

[0099] The term “transgenic plant” refers to a plant comprising such a transgene. A “transgenic plant” includes a plant, plant part, a plant cell or seed whose genome has been altered by the stable integration of recombinant DNA. A transgenic plant includes a plant regenerated from an originally-transformed plant cell and progeny transgenic plants from later generations or crosses of a transformed plant. As a result of such genomic alteration, the transgenic plant is distinctly different from the related wild type plant. An example of a transgenic plant is a plant described herein as comprising one or more of the Rf1, Rf3, Rf4, Rf7 or Rf-rye nucleic acids, typically as transgenic elements. For example, the transgenic plant includes one or more Rf1, Rf3, Rf4, Rf7 or Rf-rye nucleic acids as transgene, inserted at loci different from the native locus of the corresponding Rf gene(s). Accordingly, it is herein disclosed a method for producing a wheat transgenic plant, wherein the method comprises the steps of
[0100] (i) transforming a parent wheat plant with Rf1, Rf3, Rf4, Rf7 and/or Rf-rye nucleic acids,
[0101] (ii) selecting a plant comprising said one or more nucleic acid(s) as transgene(s),
[0102] (iii) regenerating and
[0103] (iv) growing said wheat transgenic plant.

[0104] For transformation methods within a plant cell, one can cite methods of direct transfer of genes such as direct micro-injection into plant embryos, vacuum infiltration or electroporation, direct precipitation by means of PEG or the bombardment by gun of particles covered with the plasmidic DNA of interest.

[0105] It is preferred to transform the plant cell with a bacterial strain, in particular Agrobacterium, in particular Agrobacterium tumefaciens. In particular, it is possible to use the method described by Ishida et al. (Nature Biotechnology, 14, 745-750, 1996) for the transformation of monocotyledons.

[0106] Descriptions of Agrobacterium vector systems and methods for Agrobacterium-mediated gene transfer are provided by Moloney et al., Plant Cell Reports 8:238 (1989). See also, U.S. Pat. No. 5,591,616 issued Jan. 7, 1997.

[0107] Alternatively, direct gene transfer may be used. A generally applicable method of plant transformation is microprojectile-mediated transformation wherein DNA is carried on the surface of microprojectiles measuring 1 to 4 micron. The expression vector is introduced into plant tissues with a biolistic device that accelerates the microprojectiles to speeds of 300 to 600 m/s which is sufficient to penetrate plant cell walls and membranes. Sanford et al., Part. Sci. Technol. 5:27 (1987), Sanford, J. C., Trends Biotech. 6:299 (1988), Klein et al., BioTechnology 6:559-563 (1988), Sanford, J. C., Physiol Plant 7:206 (1990), Klein et al., BioTechnology 10:268 (1992). Several target tissues can be bombarded with DNA-coated microprojectiles in order to produce transgenic plants, including, for example, callus (Type I or Type II), immature embryos, and meristematic tissue.

[0108] Following transformation of wheat target tissues, expression of the selectable marker genes allows for preferential selection of transformed cells, tissues and/or plants, using regeneration and selection methods now well known in the art.

[0109] The foregoing methods for transformation would typically be used for producing a transgenic plant including one or more of Rf1, Rf3, Rf4, Rf7 or Rf Rye nucleic acids as transgenic element(s).

[0110] The transgenic plant could then be crossed, with another (non-transformed or transformed) inbred line, in order to produce a new transgenic line. Alternatively, a genetic trait which has been engineered into a particular line using the foregoing transformation techniques could be moved into another line using traditional backcrossing techniques that are well known in the plant breeding arts. For example, a backcrossing approach could be used to move an engineered trait from a public, non-elite inbred line into an elite inbred line, or from an inbred line containing a foreign gene in its genome into an inbred line or lines which do not contain that gene. As used herein, “crossing” can refer to a simple X by Y cross, or the process of backcrossing, depending on the context.

[0111] When the term transgenic wheat plant is used in the context of the present disclosure, this also includes any wheat plant including, as a transgenic element one or more of Rf1, Rf3, Rf4, Rf7 or Rf-rye nucleic acids and wherein one or more desired traits have further been introduced through backcrossing methods, whether such trait is a naturally occurring one or a transgenic one. Backcrossing methods can be used with the present invention to improve or introduce one or more characteristic into the inbred. The term backcrossing as used herein refers to the repeated crossing of a hybrid progeny back to one of the parental wheat plants. The parental wheat plant which contributes the gene or the genes for the desired characteristic is termed the nonrecurrent or donor parent. This terminology refers to the fact that the nonrecurrent parent is used one time in the backcross protocol and therefore does not recur. The parental wheat plant to which the gene or genes from the nonrecurrent parent are transferred is known as the recurrent parent as it is used for several rounds in the backcrossing protocol (Fehr et al, 1987).

[0112] In a typical backcross protocol, the recurrent parent is crossed to a second nonrecurrent parent that carries the gene or genes of interest to be transferred. The resulting progeny from this cross are then crossed again to the recurrent parent and the process is repeated until a wheat plant is obtained wherein all the desired morphological and physiological characteristics of the recurrent parent are recovered in the converted plant in addition to the gene or genes transferred from the nonrecurrent parent. It should be noted that some, one, two, three or more, self-pollination and growing of a population might be included between two successive backcrosses.

[0113] Methods for Producing a Wheat Genetically Engineered Plant

[0114] An aspect of the present disclosure relates to a DNA fragment of the corresponding protein restorer of fertility (either naturally occurring coding sequence, or improved sequence, such as codon optimized sequence) combined with genome editing tools (such TALENs, CRISPR-Cas, Cpf1 or zing finger nuclease tools) to target the corresponding Rf restorer alleles within the wheat plant genome by insertion at any locus in the genome or by partial or total allele replacement at the corresponding locus.

[0115] In particular, the disclosure relates to a genetically modified (or engineered) wheat plant, wherein the method comprises the steps of genetically modifying a parent wheat plant to obtain in their genome one or more nucleotide sequence encoding protein restorer of T. timopheevii CMS cytoplasm Rf1, Rf3, Rf4 or Rf7 as disclosed herein, preferably by genome-editing, selecting a plant comprising said one or more nucleotide sequences as genetically engineered elements, regenerating and growing said wheat genetically engineered plant.

[0116] As used herein, the term “genetically engineered element” refers to a nucleic acid sequence present in the genome of a plant and that has been modified by mutagenesis or by genome-editing tools, preferentially by genome-editing tools. In specific embodiments, a genetically engineered element refers to a nucleic acid sequence that is not normally present in a given host genome in the genetic context in which the sequence is currently found but is incorporated in the genome of plant by use of genome-editing tools. In this respect, the sequence may be native to the host genome, but be rearranged with respect to other genetic sequences within the host genomic sequence. For example, the genetically engineered element is a gene that is rearranged at a different locus as compared to a native gene. Alternatively, the sequence is a native coding sequence that has been placed under the control of heterologous regulatory sequences. Other specific examples are described hereafter. The term “genetically engineered plant” or “genetically modified plant” refers to a plant comprising such genetically engineered element. A “genetically engineered plant” includes a plant, plant part, a plant cell or seed whose genome has been altered by the stable integration of recombinant DNA. As used herein, the term “genetically engineered plant” further includes a plant, plant part, a plant cell or seed whose genome has been altered by genome editing techniques. A genetically engineered plant includes a plant regenerated from an originally-engineered plant cell and progeny of genetically engineered plants from later generations or crosses of a genetically engineered plant. As a result of such genomic alteration, the genetically engineered plant is distinctly different from the related wild type plant. An example of a genetically engineered plant is a plant described herein as comprising one or more of the Rf1, Rf3, Rf4, Rf7 or Rf-rye nucleic acids. For example, the genetically engineered plant includes one or more Rf1, Rf3, Rf4, Rf7 or Rf-rye nucleic acids as genetically engineered elements, inserted at loci different from the native locus of the corresponding Rf gene(s).

[0117] In specific embodiments, said genetically engineered plants do not include plants which could be obtained exclusively by means of an essentially biological process. Said one or more genetically engineered element(s) enables the expression of polypeptides which restore or improve male fertility to the plant having T. timopheevii CMS cytoplasm, as compared to the parent plant which do not comprise the genetically engineered element(s).

[0118] A particular genetically engineered element is the Rf nucleic acid as defined above, for example Rf1 nucleic acids as defined above. In specific embodiments, a genetically engineered element includes an Rf nucleic acid under the control of expression elements as promoter and/or terminator. Suitable promoter can be a constitutive promoter, such as the ZmUbi promoter or an endogenous Rf promoter native or modified.

[0119] Another aspect of the disclosure relates to a genetically engineered wheat plant, which comprises the modification by point mutation insertion or deletion of one or few nucleotides of an allele sequence rf or Rf, as genetically engineered element, into the respectively Rf or rf allele, by any of the genome editing tools including base-editing tool as described in WO2015089406 or by mutagenesis.

[0120] The present disclosure further includes methods for modifying fertility level in a plant by genome editing, comprising providing a genome editing tool capable of replacing partially or totally a rf1, rf3, rf4, rf7 or rf-rye non-restorer allele sequence or form in a wheat plant by its corresponding Rf1, Rf3, Rf4, Rf7 or Rf-rye restorer allele sequence as disclosed herein.

[0121] The term “rf non-restorer allele sequence or form” can be related to the presence in the genome of a rf non-restorer allele or to the absence in the genome of any rf or Rf allele. For example, in the rf3/Rf3 system, one wheat non-restorer line can be characterized by the presence of a rf3 allele sequence while another non-restorer line is characterized by the absence of any Rf3 or rf3 allelic sequence. The Rf3 restorer plant will be characterized by the presence of the Rf3 allele sequence in the genome. In the case of the rf4/Rf4 system, the non-restorer plant is characterized by the absence of any rf4 or Rf4 allelic forms while the Rf4 restorer plant will be characterized by the presence in the genome of the Rf4 gene sequence.

[0122] In specific embodiments, methods for modifying fertility level in a plant by genome editing comprises providing a genome editing tool capable of replacing or modifying a rf3 non-restorer allele to obtain a Rf3 restorer allele comprising SEQ ID NO:3146 (RFL29a). In other specific embodiments, rf3 non-restorer allele may comprise RFL29c characterized by a frameshift compared to RFL29a nucleotide sequence as shown in Example 22 and FIG. 12 and SEQ ID NO:3457.

[0123] The disclosure further includes methods for modifying fertility level in a plant introducing the endogenous promoter of a restorer Rf gene in order to increase the expression of the corresponding endogenous Rf gene either by genome-editing or by mutagenesis.

[0124] In a specific embodiment, the disclosure includes methods for modifying fertility level in a plant by genome editing of a weak fertile plant by modifying the 5′UTR sequence of the Rf3 “weak” RFL29b allele which 5′UTR region includes a 163 bp insertion to be deleted as shown in example 15.

[0125] In a further specific embodiment, the invention includes a method for modifying fertility level in a plant by mutagenesis or by genome editing the endogenous promoter of a restorer Rf gene in order to increase the expression of the endogenous Rf gene. As an example, the sequence of proTaRFL79 depicted in SEQ ID No 3123 could be mutated or edited to increase RFL79 protein level.

[0126] In another specific embodiment, whenever a stronger promoter is located upstream to the promoter of the Rf restorer gene, a deletion of that promoter and the region upstream can be achieved in order to juxtapose the stronger promoter to the Rf gene.

[0127] In a specific embodiment, one rf non-restorer allele is replaced partially or totally by anyone of the Rf1, Rf3, Rf4, Rf7 or Rf-rye restorer allele. In such disclosure, a non-restorer rf1 allele could be replaced, for example, by a Rf3, or a Rf4, or a Rf7, or Rf-rye allele.

[0128] In another aspect of the disclosure, at least one restorer allele from among Rf1, Rf3, Rf4, Rf7 and Rf-Rye can be integrated at one or more target sites in the wheat plant genome, typically in order to get an expression of said restorer alleles. Said expression can be achieved either by taking advantage of the presence at the targeting locus of a promoter, more specifically a strong promoter, and/or a terminator and by targeting with the Rf allele said expression elements. In a specific embodiment, the endogenous Rf allele is deleted from one first locus and further integrated downstream a suitable promoter at a second locus in the same plant genome.

[0129] In a specific embodiment of the invention, the target sites can be located in the Rf1, Rf3, Rf4 and/or Rf7 locus as defined in example 17. In a more specific embodiment, the target sites can either be the Rf1, Rf3, Rf4, Rf7 or Rf-Rye endogenous gene sequence or any other target sites different from the Rf1, Rf3, Rf4, Rf7 or Rf-Rye endogenous gene sequences.

[0130] In a preferred aspect of the disclosure, a wheat plant can comprise in its genome, at only one locus, the Rf1, Rf3 and Rf7 restorer alleles.

[0131] Such genome editing tool includes without limitation targeted sequence modification provided by double-strand break technologies such as, but not limited to, meganucleases, ZFNs, TALENs (WO2011072246) or CRISPR CAS system (including CRISPR Cas9, WO2013181440), Cpf1 or their next generations based on double-strand break technologies using engineered nucleases.

[0132] Method for Decreasing the Fertility Level in Wheat Plant:

[0133] Alternatively, the present disclosure further includes methods for modifying fertility level in a plant by reverting a restorer line comprising a Rf allele to a maintainer line comprising a rf allele. Such method could be used for any plant comprising a Rf allele, including Rf1. It is of particular interest in the case of a hybrid production system based on Rf3 restorer allele, wherein for example, the Rf3 sequence is RFL29a and the rf3 sequence is RFL29c.

[0134] The decrease in fertility could be obtained by knocking-down Rf gene or allele as described below.

[0135] More specifically, the method can correspond first to an inhibition of the expression by RNAi directed against the Rf allele of interest or by impairing the promoter function of the Rf allele either by mutagenesis or by genome editing.

[0136] In another aspect, the fertility level decrease is obtained by mutagenesis, classically induced with mutagenic agents, or by genome editing technologies to impair the protein function, by deleting totally or partially the gene, or by modifying the gene sequence reading frame to impair protein translation.

[0137] In a further aspect, the disclosure relates to the transgenic or genetically engineered wheat plant with decreased fertility level obtained by the methods described above.

[0138] The Transgenic or Genetically Engineered Wheat Plant of the Present Disclosure

[0139] Another aspect of the present disclosure relates to a transgenic or genetically engineered wheat plant comprising one or more Rf1, Rf3, Rf4, Rf7 or Rf-rye nucleic acid(s) as described in the previous sections, as transgenic or genetically engineered elements respectively.

[0140] Said transgenic or genetically engineered plant may be obtained by the methods described in the previous section.

[0141] The transgenic or genetically engineered plants of the present disclosure may advantageously be used as parent plant in order to produce fertile wheat transgenic or genetically engineered plant restorer of T. timopheevii CMS cytoplasm. In particular, in specific embodiment, the wheat transgenic or genetically engineered plant is a fertile wheat transgenic or genetically engineered plant restorer of T. timopheevii CMS cytoplasm. Typically, a transgenic or genetically engineered wheat plant according to the present disclosure comprises a combination of at least two different transgenic or genetically engineered elements selected from the group consisting of Rf1, Rf3, Rf4, Rf7 and Rf-rye encoding nucleic acids.

[0142] The transgenic or genetically engineered wheat plant as disclosed herein may express such protein restorer of fertility Rf1, Rf3, Rf4, Rf7 and/or Rf-Rye together as the result of the transgene's expression or expression of the genetically engineered element and may additionally express other protein restorer of fertility, as the result of naturally occurring alleles.

[0143] In one embodiment, said combination of at least two, three or four of Rf1, Rf3, Rf4, Rf7 and Rf-rye nucleic is found in the same locus in the genome of the transgenic or genetically engineered plant. In other embodiments, the corresponding nucleic acids of the combination are located in distinct loci. In one specific embodiment, said combination may be obtained by crossing transgenic plants of the present disclosure each bearing one nucleic acid of the combination as a transgene at a distinct locus.

[0144] Typically, said transgenic or genetically engineered plant includes the following combination of nucleic acids as transgenic or genetically engineered elements:
[0145] a. a Rf1 nucleic acid, preferably encoding an amino acid sequence having at least 95% identity or at least 96% identity with any one of SEQ ID NOs359, 361, 362 or SEQ ID NOs428-430, preferably SEQ ID NO:361, typically a Rf1 nucleic acid comprises SEQ ID NO:3119, and Rf3 nucleic acid, preferably encoding an amino acid sequence having at least 95% identity or at least 96% identity with any one of SEQ ID NOs:315-321, SEQ ID NOs:379-381, SEQ ID NOs:147 and 150, SEQ ID NOs:156 and 158, SEQ ID NOs297 and 299, SEQ ID NO:676 and SEQ ID NO:684,
[0146] b. a Rf1 nucleic acid, preferably encoding an amino acid sequence having at least 95% identity or at least 96% identity with any one of SEQ ID NOs359, 361, 362 or SEQ ID NOs428-430, preferably SEQ ID NO:361, typically a Rf1 nucleic acid comprises SEQ ID NO:3119, and Rf7 nucleic acid, preferably encoding an amino acid sequence having at least 95% identity or at least 96% identity with any one of SEQ ID NO:363, SEQ ID NO:516 and SEQ ID NO:768,
[0147] c. a Rf1 nucleic acid, preferably encoding an amino acid sequence having at least 95% identity or at least 96% identity with any one of SEQ ID NOs359, 361, 362 or SEQ ID NOs428-430, preferably SEQ ID NO:361, typically a Rf1 nucleic acid comprises SEQ ID NO:3119, and Rf-rye nucleic acid, preferably encoding an amino acid sequence having at least 95% identity or at least 96% identity, with any one of SEQ ID NO:227, SEQ ID NO:378 and SEQ ID NO:859,
[0148] d. a Rf3 nucleic acid, preferably encoding an amino acid sequence having at least 95% identity or at least 96% identity with any one of SEQ ID NOs:315-321, SEQ ID NOs:379-381, SEQ ID NOs:147 and 150, SEQ ID NOs:156 and 158, SEQ ID NOs297 and 299, SEQ ID NO:676 and SEQ ID NO:684, and Rf7 nucleic acid, preferably encoding an amino acid sequence having at least 95% identity or at least 96% identity with SEQ ID NO:363, SEQ ID NO:516 and SEQ ID NO:768,
[0149] e. a Rf3 nucleic acid, preferably encoding an amino acid sequence having at least 95% identity or at least 96% identity with any one of SEQ ID NOs:315-321, SEQ ID NOs:379-381, SEQ ID NOs:147 and 150, SEQ ID NOs:156 and 158, SEQ ID NOs297 and 299, SEQ ID NO:676 and SEQ ID NO:684, and Rf-rye nucleic acid, preferably encoding an amino acid sequence having at least 95% identity or at least 96% identity with any one of SEQ ID NO:227, SEQ ID NO:378 and SEQ ID NO:859,
[0150] f. a Rf7 nucleic acid, preferably encoding an amino acid sequence having at least 95% identity or at least 96% identity with SEQ ID NO:363, SEQ ID NO:516 and SEQ ID NO:768, and Rf-rye nucleic acid, preferably encoding an amino acid sequence having at least 95% identity or at least 96% identity with any one of SEQ ID NO:227, SEQ ID NO:378 and SEQ ID NO:859,
[0151] g. a Rf1 nucleic acid, preferably encoding an amino acid sequence having at least 95% identity or at least 96% identity with any one of SEQ ID NOs359, 361, 362 or SEQ ID NOs428-430, preferably SEQ ID NO:361, typically a Rf1 nucleic acid comprises SEQ ID NO:3119, and Rf3 nucleic acid, preferably encoding an amino acid sequence having at least 95% identity or at least 96% identity with any one of SEQ ID NOs:315-321, SEQ ID NOs:379-381, SEQ ID NOs:147 and 150, SEQ ID NOs:156 and 158, SEQ ID NOs297 and 299, SEQ ID NO:676 and SEQ ID NO:684, and Rf7 nucleic acid, preferably encoding an amino acid sequence having at least 95% identity or at least 96% identity with any one of SEQ ID NO:363, SEQ ID NO:516 and SEQ ID NO:768;
[0152] h. a Rf1 nucleic acid, preferably encoding an amino acid sequence having at least 95% identity or at least 96% identity with any one of SEQ ID NOs359, 361, 362 or SEQ ID NOs428-430, preferably SEQ ID NO:361, typically a Rf1 nucleic acid comprises SEQ ID NO:3119, and Rf3 nucleic acid, preferably encoding an amino acid sequence having at least 95% identity or at least 96% identity with any one of SEQ ID NOs:315-321, SEQ ID NOs:379-381, SEQ ID NOs:147 and 150, SEQ ID NOs:156 and 158, SEQ ID NOs297 and 299, SEQ ID NO:676 and SEQ ID NO:684, and Rf-rye nucleic acid, preferably encoding an amino acid sequence having at least 95% identity, or at least 96% identity, with any one of SEQ ID NO:227, SEQ ID NO:378 and SEQ ID NO:859;
[0153] i. a Rf1 nucleic acid, preferably encoding an amino acid sequence having at least 95% identity, for example at least 96% identity with any one of SEQ ID NOs359, 361, 362 or SEQ ID NOs428-430, preferably SEQ ID NO:361, typically a Rf1 nucleic acid comprises SEQ ID NO:3119, and Rf7 nucleic acid of Claim 4, preferably encoding an amino acid sequence having at least 95% identity or at least 96% identity with any one of SEQ ID NO:363, SEQ ID NO:516 and SEQ ID NO:768, and Rf-rye nucleic acid, preferably encoding an amino acid sequence having at least 95% identity or at least 96% identity, with any one of SEQ ID NO:227, SEQ ID NO:378 and SEQ ID NO:859; or, j. a Rf3 nucleic acid, preferably encoding an amino acid sequence having at least 95% identity or at least 96% identity with any one of SEQ ID NOs:315-321, SEQ ID NOs:379-381, SEQ ID NOs:147 and 150, SEQ ID NOs:156 and 158, SEQ ID NOs297 and 299, SEQ ID NO:676 and SEQ ID NO:684, and Rf7 nucleic acid, preferably encoding an amino acid sequence having at least 95% identity or at least 96% identity with any one of SEQ ID NO:363, SEQ ID NO:516 and SEQ ID NO:768, and Rf-rye nucleic acid, preferably encoding an amino acid sequence having at least 95% identity or at least 96% identity with any one of SEQ ID NO:227, SEQ ID NO:378 and SEQ ID NO:859.

[0154] In other specific embodiments, said transgenic or genetically engineered plant further includes a Rf4 nucleic acid encoding an amino acid sequence having at least 95% identity to any one of SEQ ID NOs:477, and SEQ ID NOs3135-3138 in addition to any one of the above defined combination of Rf1, Rf3, Rf7 and/or Rf-Rye nucleic acids as defined in the previous paragraph, as transgenic elements.

[0155] The disclosure also relates to hybrid wheat plants which can be produced by crossing a transgenic or genetically engineered wheat plant restorer of fertility according to the present disclosure as described above with a second plant.

[0156] In certain embodiments, the wheat plant according to the disclosure is alloplasmic and comprises the T. timopheevii cytoplasm.

[0157] For example, a hybrid wheat plant may be obtained by crossing a wheat plant restorer of fertility according to the present disclosure as described above, preferably comprising Rf1, Rf3, Rf4, Rf7 or Rf-rye nucleic acids, and a wheat plant which does not express corresponding Rf1, Rf3, Rf4, Rf7 or Rf-rye protein restorer of fertility.

[0158] It is also disclosed herein a method for producing a wheat hybrid transgenic or genetically engineered plant comprising the steps of:
[0159] a. crossing a sterile female wheat plant comprising the T.timopheevii cytoplasm with a fertile male transgenic or genetically engineered wheat plant restorer of fertility of the present disclosure as described above;
[0160] b. collecting the hybrid seed;
[0161] c. optionally detecting the presence of T.timopheevii cytoplasm, and/or at least one or more of the Rf nucleic acids chosen amongst Rf1, Rf3, Rf4, Rf7 and Rf-rye in the hybrid seed, as transgenic elements or genetically engineered elements; and,
[0162] d. optionally detecting hybridity level of the hybrid seed.

[0163] Therefore, it is also disclosed herein the wheat transgenic or genetically engineered plants or lines according to the present disclosure developed to obtain such hybrid plants. Such transgenic or genetically engineered plants or lines typically comprise the cytoplasmic elements necessary for the implementation of the corresponding hybrid system. Preferably, the transgenic or genetically engineered plants or lines comprise a combination of at least two, three or four of Rf1, Rf3, Rf4, Rf7 and Rf-rye nucleic acids, and T. timopheevii cytoplasm.

[0164] Alternatively, the detection of the presence of T. timopheevii cytoplasm and of at least one or more of the Rf nucleic acids chosen amongst Rf1, Rf3, Rf4, Rf7 and Rf-rye (step “c” of the method described above) can be performed on the parent lines in order to check their genotype before to start the cross (step “a”).

[0165] In a certain embodiment of the disclosure, the male wheat plant is taller than the female wheat plant. This can be achieved by using male plant bearing Rht alleles that allows to obtain the size differences. Optionally, the disclosure further comprises the step of to applying an herbicide to the fertile plants standing above the height of the shorter female plants, and further optionally, comprises the step of harvesting the seeds and selecting the seeds to remove undesirable self-fertilized male seeds, using a morphological character and/or a phenotypic character like size, shape, color etc . . . . An example of such method for hybrid production is described in WO2015135940.

[0166] The T-CMS cytoplasm can be detected either phenotypically wherein a plant bearing rf genes and a T-CMS cytoplasm will be sterile or by molecular means able to detect the orf256 gene as described in Rathburn and Hedgcoth, 1991 and Song and Hedgcoth, 1994.

[0167] The disclosure also relates to a method for improving the level of fertility restoration of a parent wheat plant bearing a fertility level lower than a full restoration level, comprising the steps of transforming said parent wheat plant with a vector comprising a Rf1, Rf3, Rf4, Rf7 and/or Rf-rye nucleic acid as described above, or genetically engineering said Rf1, Rf3, Rf4, Rf7 and/or Rf-rye nucleic acids in said wheat plant. The method further comprises the step of selecting a transgenic or genetically engineered wheat plant comprising said Rf1, Rf3, Rf4, Rf7 and/or Rf-rye nucleic acid(s) as a transgene or genetically engineered element, preferably Rf1, Rf3 and Rf4, regenerating and growing said transgenic or genetically engineered wheat plant, wherein said transgenic or genetically engineered wheat plant has an improved fertility restoration level as compared to the parent plant.

[0168] The disclosure further provides a method for restoring fertility of a sterile wheat plant bearing the T. timopheevii CMS cytoplasm, comprising the step of transforming a parent sterile wheat plant bearing the T. timopheevii CMS cytoplasm, with a Rf1, Rf3, Rf4, Rf7 and/or Rf-rye nucleic acid as described above or genetically engineering said sterile plant to express a Rf1, Rf3, Rf4, Rf7 and/or Rf-rye nucleic acids.

[0169] Use of the Nucleic Acids of the Present Disclosure for Identifying Rf1, Rf3, Rf4, Rf7 and Rf-Rye Restorer Alleles or Transgenic Elements

[0170] The present disclosure further provides methods of identifying the respective Rf1, Rf3, Rf4, Rf7 and/or Rf-rye restorer alleles and/or Rf1, Rf3, Rf4, Rf7 and/or Rf-rye nucleic acids as disclosed in the previous sections, and more generally methods of selecting or breeding wheat plants for the presence or absence of the Rf1, Rf3, Rf4, Rf7 and/or Rf-rye fertility restorer alleles and/or corresponding Rf1, Rf3, Rf4, Rf7 and/or Rf-rye nucleic acids.

[0171] Such methods of identifying, selecting or breeding wheat plants comprise obtaining one or more wheat plants and assessing their DNA to determine the presence or absence of the Rf1, Rf3, Rf4, Rf7 and/or Rf-rye fertility restorer alleles and/or corresponding Rf1, Rf3, Rf4, Rf7 and/or Rf-rye nucleic acids.

[0172] Such methods may be used, for example, to determine which progeny resulting from a cross have the required fertility restorer allele or Rf nucleic acids (or combination thereof) and accordingly to guide the preparation of plants having the required fertility restorer allele or Rf nucleic acids in combination with the presence or absence of other desirable traits.

[0173] The method will consist of identifying the presence of the Rf1, Rf3, Rf4, Rf7 and/or Rf-rye allele or nucleic acids in the fertile plant, said plant being either a fertile transgenic plant or a non-transgenic plant. Optionally, the method further consists of identifying the absence of the Rf1, Rf3, Rf4, Rf7 and/or Rf-rye allele or nucleic acids in non-restorer plants and/or sterile plants.

[0174] Accordingly, it is disclosed herein the means for specifically detecting the Rf1, Rf3, Rf4, Rf7 and/or Rf-rye nucleic acids in a wheat plant.

[0175] Such means include for example a pair of primers for the specific amplification of a fragment nucleotide sequence of Rf1, Rf3, Rf4, Rf7 and/or Rf-rye nucleic acids from plant wheat genomic DNA.

[0176] As used herein, a primer encompasses any nucleic acid that is capable of priming the synthesis of a nascent nucleic acid in a template-dependent process, such as PCR. Typically, primers are oligonucleotides from 10 to 30 nucleotides, but longer sequences can be employed. Primers may be provided in double-stranded form though single-stranded form is preferred.

[0177] Alternatively, nucleic acid probe can be used for the specific detection of any one of Rf1, Rf3, Rf4, Rf7 and/or Rf-rye nucleic acids.

[0178] As used herein, a nucleic acid probe encompass any nucleic acid of at least 30 nucleotides and which can specifically hybridizes under standard stringent conditions with a defined nucleic acid. Standard stringent conditions as used herein refers to conditions for hybridization described for example in Sambrook et al 1989 which can comprise 1) immobilizing plant genomic DNA fragments or library DNA on a filter 2) prehybridizing the filter for 1 to 2 hours at 65° C. in 6×SSC 5×Denhardt's reagent, 0.5% SDS and 20 mg/ml denatured carrier DNA 3) adding the probe (labeled) 4) incubating for 16 to 24 hours 5) washing the filter once for 30 min at 68° C. in 6×SSC, 0.1% SDS 6) washing the filter three times (two times for 30 min in 30 ml and once for 10 min in 500 ml) at 68° C. in 2×SSC 0.1% SDS. The nucleic acid probe may further comprise labeling agent, such as fluorescent agents covalently attached to the nucleic acid part of the probe.

[0179] Methods of Producing a Wheat Plant Carrying a Modified Rf3 Restorer of Fertility

[0180] The inventors have also identified two types of Rf3 restorer of fertility, one with a strong fertility restoration, for example, capable of providing plants with a fertility score above 1.0, for example comprised between 1.0 and 2.0 and another with a weak fertility restoration, for example, capable of providing plants having a fertility score below 0.1, for example comprised between 0.5 and 1.0.

[0181] Surprisingly, the strong fertility restoration correlates with the absence in the genome of the wheat plant carrying Rf3 of a 163 bp fragment of SEQ ID NO:3174, located in the 5′UTR of Rf3 coding sequence.

[0182] Accordingly, the disclosure relates to a method for producing a wheat plant carrying a Rf3 restorer of fertility, said method comprising (i) providing a parent wheat plant comprising in its genome at least a 163 bp fragment of SEQ ID NO:3174, and (ii) deleting a fragment of at least 10 bp of said fragment of SEQ ID NO:3174, for example at least 20 bp, 30 bp, 40 bp, 50 bp, 60 bp, 70 bp, 80 bp, 90 bp, 100 bp, 110 bp, 120 bp, 130 bp, 140 bp, 150 bp, 160 bp or the whole fragment of SEQ ID NO:3174 in the genome of said wheat plant, thereby obtaining said wheat plant carrying a Rf3 restorer of fertility.

[0183] Advantageously, the fertility score of the obtained wheat plant has a fertility score higher than the parent wheat plant, due to the deletion of said fragment depicted in SEQ ID NO:3174. The skilled person may select the deletion such as to obtain an increase in fertility restoration as compared to the parent wheat plant with the full fragment of SEQ ID NO:3174 in its genome.

[0184] In specific embodiments, the parent wheat plant has a fertility score below 1, for example comprised between 0.5 and 1.0 and the obtained wheat plant has a fertility score above 1.0, for example comprised between 1.0 and 2.0.

[0185] It is also possible to restore fertility from plants having rf3 non-restorer allele presenting a frameshift due to nucleotides deletion or insertion as compared to the Rf3 restorer allele RLF29a sequence of SEQ ID NO:3146 (see also Example 22).

[0186] Such deletion of genomic fragment or correction of frameshift may be obtained by any suitable methods known by the skilled person in the art, including genome editing tools such as, but not limited to, meganucleases, ZFNs, TALENs (WO2011072246) or CRISPR CAS system (including CRISPR Cas9, WO2013181440) or their next generations based on double-strand break technologies using engineered nucleases. Examples of such methods are also described in Example 15 and Example 22.

[0187] The wheat plants as obtained by the method described above are also part of the disclosure. Typically, such wheat plant as obtained by the above method, or obtainable by such method, carries a Rf3 restorer of fertility, wherein only a part but not the whole genomic fragment of SEQ ID NO:3174 is deleted in the genome of said wheat plant. Typically, a fragment between 10 bp and 162 bp of SEQ ID NO:3174 is deleted in the genome of said wheat plant. It is expected that the obtained wheat plant with the genome deletion has a fertility score higher than the fertility score as measured in a parent wheat plant with identical genome except for the full sequence of SEQ ID NO:3174 in its genome. Alternatively, such wheat plant as obtained by the above method, or obtainable by such method, carries a Rf3 restorer of fertility, wherein nucleotides of RFL29c has been deleted or added to restore in frame translation.

[0188] Methods for Assessing Fertility Restoration in a Wheat Plant

[0189] The disclosure also includes a method for assessing fertility restoration in a wheat plant, said method comprising determining the presence or absence of a fragment of SEQ ID NO:3174 in the genome of said plant, wherein the presence of the whole fragment is indicative of a weak restoration of fertility and a deletion of at least a part of such fragment is indicative of a strong restoration of fertility. Typically said method is performed in a wheat plant which is susceptible to carry a Rf3 restorer of fertility.

[0190] It is also disclosed herein nucleic acid probes for use in the above methods for assessing fertility restoration in wheat plant, wherein said nucleic acid probe consists of a nucleic acid of at least 10 nucleotides within SEQ ID NO:3174.

[0191] Typically, said nucleic acid probe is a fragment of at least 20 bp, 30 bp, 40 bp, 50 bp, 60 bp, 70 bp, 80 bp, 90 bp, 100 bp, 110 bp, 120 bp, 130 bp, 140 bp, 150 bp, 160 bp or the whole fragment of SEQ ID NO:3174.

[0192] The Wheat Plant Restorer of Fertility of T. timopheevii CMS Cytoplasm with at Least Three Specific Fertility Restorer Alleles

[0193] The inventors have shown that a combination of at least 3 specific fertility restorer alleles within the restorer loci Rf1, Rf3, Rf4 and Rf7 enable the obtention of plants with full restoration of fertility of T. timopheevii CMS cytoplasm.

[0194] Therefore, a first aspect of the present disclosure relates to a wheat plant restorer of fertility of T. timopheevii CMS cytoplasm, wherein the plant comprises at least three fertility restorer alleles within the restorer loci chosen amongst Rf1, Rf3, Rf4 and Rf7.

[0195] In specific embodiments, the plant comprises at least the three fertility restorer alleles Rf1, Rf3, Rf4.

[0196] In specific embodiments, the plant comprises at least the three fertility restorer alleles Rf1, Rf4, Rf7.

[0197] In specific embodiments, the plant comprises at least the three fertility restorer alleles Rf1, Rf3, Rf7.

[0198] In specific embodiments, the plant comprises at least the three fertility restorer alleles Rf3, Rf4, Rf7.

[0199] As used herein, the Rf1 locus refers to the locus of the Rf1 restorer allele, which locus is located at most 10 cM, preferably at most 7 cM, more preferably at most 2 cM, from marker cfn0522096 of SEQ ID NO:4 and/or from marker cfn05277067 of SEQ ID NO:10. In a specific embodiment, the wheat plant restorer of fertility according to the present disclosure includes at least one Rf1 restorer allele, said Rf1 restorer allele being located within the chromosomal interval between SNP markers cfn0522096 of SEQ ID NO:3190 and cfn05277067 of SEQ ID NO:3196. In specific embodiments, the wheat plant restorer of fertility includes one Rf1 restorer allele at the Rf1 locus characterized by the presence of one or more of the SNP allele(s) as identified by Table 1.

TABLE 1
SNP markers for mapping of Rf1 locus

| | | Marker SEQ ID | |
|---|---|---|---|
| SNP# | Marker Name | NO: | Restorer Allele |
| SNP1 | cfn523072 | 3187 | T |
| SNP2 | cfn0523109 | 3188 | A |
| SNP3 | 276I13_96B22_97797 | 3189 | C |
| SNP4 | cfn0522096 | 3190 | C |
| SNP5 | cfn0527763 | 3191 | C |
| SNP6 | 104A4_105172 | 3192 | TG |
| SNP7 | 104A4_105588 | 3193 | A |
| SNP8 | cfn0373248 | 3194 | T |
| SNP9 | cfn1097828 | 3195 | C |
| SNP10 | cfn0527067 | 3196 | A |
| SNP11 | cfn0528390 | 3197 | G |
| SNP12 | BWS0267 | 3198 | A |
| SNP13 | cfn0527718 | 3199 | T |
| SNP14 | cfn0524469 | 3200 | G |
| SNP15 | cfn0524921 | 3201 | G |
| SNP16 | cfn1122326 | 3202 | C |

[0200] Preferably, the wheat plant restorer of fertility according to the present disclosure includes one Rf1 restorer allele at the Rf1 locus characterized by the presence of the SNP3 and/or SNP7 restorer alleles(s) as described in Table 1. More preferably, the wheat plant restorer of fertility is characterized by the haplotypes of the SNP3 and SNP7 restorer alleles “C” and “A”. In specific embodiments, the wheat plant restorer of fertility with Rf1 restorer allele comprises a Rf1 nucleic acid of the present disclosure as described above. Examples of Rf1 nucleic acids comprises the disclosed Rf1 nucleic acid sequences of SEQ ID NO:1913, SEQ ID NO:1914, SEQ ID NO:1915, SEQ ID NO:1916 or SEQ ID NO:3119, preferably a Rf1 nucleic acid comprises SEQ ID NO:3119.

[0201] As used herein, the Rf3 locus refers to the locus of the Rf3 restorer allele, which locus is at most 10 cM, preferably at most 7 cM, more preferably at most 2 cM, from marker cfn1249269 of SEQ ID NO:3205 and/or from marker BS00090770 of SEQ ID NO:3228. In a specific embodiment, the wheat plant restorer of fertility includes at least one Rf3 restorer allele within the Rf3 locus, said Rf3 restorer allele being located within the chromosomal fragment between SNP markers cfn1249269 and BS00090770. In specific embodiment, the wheat plant restorer of fertility includes one Rf3 restorer allele at the Rf3 locus characterized by the presence of one or more of the SNP alleles(s) as identified by Table 2.

TABLE 2
SNP Markers for mapping of Rf3 locus

| SNP# | Marker Name | Marker SEQ ID | Restorer Allele |
|---|---|---|---|
| SNP17 | cfn1252000 | 3203 | A |
| SNP18 | IWB14060* | 3204 | G |
| SNP19 | cfn1249269 | 3205 | G |
| SNP20 | 219K1_166464 | 3206 | T |
| SNP21 | 219K1_158251 | 3207 | G |
| SNP22 | 219K1_111446 | 3208 | A |
| SNP23 | 219K1_110042 | 3209 | T |
| SNP24 | 219K1_110005 | 3210 | C |
| SNP25 | 219K1_107461 | 3211 | A |
| SNP26 | 219K1_99688 | 3212 | T |
| SNP27 | 219K1_37 | 3213 | C |
| SNP28 | cfn1270524 | 3214 | T |
| SNP29 | 136H5_3M5_7601 | 3215 | T |
| SNP30 | cfn1288811 | 3216 | G |
| SNP31 | 136H5_3M5_89176 | 3217 | A |
| SNP32 | 136H5_3M5_89263 | 3218 | T |
| SNP33 | 136H5_3M5_138211 | 3219 | T |
| SNP34 | cfn0556874 | 3220 | C |
| SNP35 | 136H5_3M5_64154 | 3221 | C |
| SNP36 | 136H5_3M5_68807 | 3222 | G |
| SNP37 | 136H5_3M5_77916 | 3223 | A |
| SNP38 | cfn1246088 | 3224 | A |
| SNP39 | cfn1287194 | 3225 | G |
| SNP40 | cfn1258380 | 3226 | A |
| SNP41 | IWB72107* | 3227 | A |
| SNP42 | BS00090770 | 3228 | T |
| SNP43 | cfn1239345 | 3229 | A |

[0202] Preferably, the wheat plant restorer of fertility according to the present disclosure includes one Rf3 restorer allele at the Rf3 locus characterized by the presence of the SNP29 and/or SNP31 restorer alleles(s) as described in Table 2. More preferably, the wheat plant restorer of fertility is characterized by the haplotype of the SNP29 and SNP31 restorer alleles “T” and “A” respectively.

[0203] In another particular embodiment, that may be combined with the previous embodiments, the wheat plant restorer of fertility according to the present disclosure includes one Rf3 restorer allele at the Rf3 locus characterized by the presence of the SNP38 and SNP41 restorer alleles “A” and “A” respectively.

[0204] Preferably, the wheat plant restorer of fertility according to the present disclosure includes a Rf3 nucleic acid comprising SEQ ID NO:1712, SEQ ID NO:2230, SEQ ID NO:2238, SEQ ID NO:3146, SEQ ID NO:3147 or SEQ ID NO:3148, preferably SEQ ID NO:3146.

[0205] As used herein, the Rf7 locus is located at most 10 cM from marker cfn0919993 of SEQ ID NO:3231. In specific embodiment, the wheat plant restorer of fertility includes one Rf7 restorer allele at the Rf7 locus characterized by the presence of one or more of the SNP alleles(s) as identified by Table 3:

TABLE 3
SNP markers of Rf7 locus

| SNP# | Marker Name | Marker SEQ ID | Restorer Allele |
|---|---|---|---|
| SNP44 | cfn0917304 | 3230 | T |
| SNP45 | cfn0919993 | 3231 | G |
| SNP46 | cfn0920459 | 3232 | C |
| SNP49 | cfn0915987 | 3445 | G |
| SNP50 | cfn0920253 | 3446 | A |
| SNP51 | cfn0448874 | 3447 | T |
| SNP52 | cfn0923814 | 3448 | C |
| SNP53 | cfn0924180 | 3449 | G |
| SNP54 | cfn0919484 | 3450 | G |

[0206] Preferably, the wheat plant restorer of fertility according to the present disclosure includes one Rf7 restorer allele at the Rf7 locus characterized by the presence of the nine SNP restorer alleles SNP44-SNP46 and SNP49-54 of “restorer allele” haplotype, as described in Table 3.

[0207] As used herein, the Rf4 locus is located at most 10 cM from marker cfn0393953 of SEQ ID NO:3233. In specific embodiment, the wheat plant restorer of fertility includes one Rf4 restorer allele at the Rf4 locus characterized by the presence of one or more of the SNP alleles(s) as identified by Table 4.

TABLE 4
SNP markers of Rf4 locus

| SNP# | Marker Name | Marker SEQ ID | Restorer Allele |
|---|---|---|---|
| SNP47 | cfn0393953 | 3233 | C |
| SNP48 | cfn0856945 | 3234 | G |

[0208] Preferably, the wheat plant restorer of fertility according to the present disclosure includes one Rf4 restorer allele at the Rf4 locus characterized by the presence of the two SNP restorer alleles, SNP47, and SNP48, of the haplotype “C” and “G” respectively, as described in Table 4.

[0209] In specific embodiments, the wheat plant restorer of fertility with Rf4 restorer allele comprises a Rf4 nucleic acid of the present disclosure as described above. Examples of Rf4 nucleic acids comprises the disclosed Rf4 nucleic acid sequences of SEQ ID NO:2031, SEQ ID NO:3140 to 3142.

[0210] In a particular embodiment, the wheat plant restorer of fertility of T. timopheevii CMS cytoplasm comprises one Rf3 restorer allele and two other fertility restorer alleles selected amongst Rf1, Rf4 and Rf7 restorer alleles. Preferably, the wheat plant restorer of fertility of T. timopheevii CMS cytoplasm according to the present disclosure comprises the Rf1, Rf3, and Rf7 restorer alleles.

[0211] In particular, it is hereby included a wheat plant comprising Rf1, Rf3 and Rf7 restorer alleles as provided by the seed samples as deposited on 25 Sep. 2017 under deposit number NCIMB 42811, NCIMB 42812, NCIMB 42813, NCIMB 42814, NCIMB 42815, NCIMB 42816, and NCIMB 42817 at the NCIMB collection.

[0212] The disclosure also relates to hybrid wheat plants which can be produced by crossing a wheat plant restorer of fertility according to the present disclosure as described above with a second plant.

[0213] In certain embodiments, the wheat plant according to the disclosure is alloplasmic and comprises the T. timopheevii cytoplasm.

[0214] For example, a hybrid wheat plant may be obtained by crossing a wheat plant restorer of fertility according to the present disclosure as described above, preferably comprising Rf1, Rf3 and Rf7 restorer alleles, and a wheat plant which does not have said fertility restorer alleles.

[0215] It is also disclosed herein a method for producing a wheat hybrid plant comprising the steps of:
[0216] a. crossing a sterile female wheat plant comprising the T.timopheevii cytoplasm with a fertile male wheat plant of the present disclosure as described above;
[0217] b. collecting the hybrid seed;
[0218] c. optionally detecting the presence of T.timopheevii cytoplasm, and/or at least three of the Rf locus chosen amongst Rf1, Rf3, Rf4 and Rf7 in the hybrid seed;
[0219] d. optionally detecting hybridity level of the hybrid seed.

[0220] Therefore, it is also disclosed herein the wheat plants or lines according to the present disclosure developed to obtain such hybrid plants. Such plants or lines typically comprise the cytoplasmic elements necessary for the implementation of the corresponding hybrid system. Preferably, the plants or lines comprise the fertility restorer alleles Rf1, Rf3 and Rf7 and T. timopheevii cytoplasm. In specific embodiments, such plants or lines comprise a fertility restorer allele Rf1 comprising a Rf1 nucleic acid of the present disclosure as disclosed above.

[0221] Alternatively, the detection of the presence of T. timopheevii cytoplasm and of at least three of the Rf locus chosen amongst Rf1, Rf3, Rf4 and Rf7 (step “c” of the method described above) can be performed on the parent lines in order to check their genotype before to start the cross (step “a”).

[0222] The T-CMS cytoplasm can be detected either phenotypically wherein a plant bearing rf genes and a T-CMS cytoplasm will be sterile or by molecular means able to detect the orf256 gene as described in Rathburn and Hedgcoth, 1991 and Song and Hedgcoth, 1994.

[0223] Method of Producing and Selecting a Wheat Plant of the Disclosure

[0224] The present disclosure also relates to the methods to produce the wheat plant with the fertility restorer alleles as described in the previous section.

[0225] In one embodiment, said method for producing the wheat plant includes the following step:
[0226] a. providing a first wheat plant comprising one or two restorer allele selected among Rf1, Rf3 and Rf7 restorer alleles,
[0227] b. crossing said first wheat plant with a second wheat plant comprising one or two restorer alleles selected among Rf1, Rf3 and Rf7 restorer alleles, wherein Rf1, Rf3 and Rf7 restorer alleles are represented at least once in the panel of restorer alleles provided by the first plant and the second plant,
[0228] c. collecting the F1 hybrid seed,
[0229] d. obtaining homozygous plants from the F1 plants,
[0230] e. optionally detecting the presence of the Rf1, Rf3 and Rf7 restorer alleles in the hybrid seed and/or at each generation.

[0231] Preferentially, the female plant in step b) is bearing the T-CMS cytoplasm. In this case, the presence of the restorer alleles is assessed at every generation from step b) to step d) by using the markers and optionally by further by assessing the fertility level.

[0232] Method to generate homozygous plants are generally well known from skilled person of the art. This could be either by repetitive backcross or by double haploid development or by Single Seeds Descent (SSD) methods.

[0233] The applicant has deposited a sample of seeds of the disclosed wheat plant with said Rf1, Rf3 and Rf7 restorer alleles, on 25 Sep. 2017 under the Budapest treaty, at NCIMB collection under the number NCIMB 42811, NCIMB 42812, NCIMB 42813, NCIMB 42814, NCIMB 42815, NCIMB 42816, and NCIMB 42817.

[0234] The present disclosure further includes and provides methods of identifying the respective Rf1, Rf3, Rf4 and/or Rf7 restorer alleles as disclosed in the previous sections, and more generally methods of selecting or breeding wheat plants for the presence or absence of the Rf1, Rf3, Rf4 and/or Rf7 fertility restorer alleles. Such methods of identifying, selecting or breeding wheat plants comprise obtaining one or more wheat plants and assessing their DNA to determine the presence or absence of the Rf1, Rf3, Rf4 and/or Rf7 fertility restorer alleles contained in the respective locus.

[0235] Such methods may be used, for example, to determine which progeny resulting from a cross have the required combination of fertility restorer alleles and accordingly to guide the preparation of plants having the required combination in combination with the presence or absence of other desirable traits.

[0236] Accordingly, plants can be identified or selected by assessing them for the presence of one or more individual SNPs appearing in the above Tables 1, 2, 3 and 4, as well as the SNPs in Table 19, for assessing the presence of restorer alleles Rf1, Rf3, Rf7 or Rf4 respectively.

[0237] More generally, it is disclosed herein the specific means for detecting the restorer alleles in a wheat plant, more specifically Rf1, Rf3, Rf4 and Rf7 restorer alleles and their combinations.

[0238] Said means thus include any means suitable for detecting the following SNP markers within one or more of the following markers: SEQ ID NOs 3187-3235.

[0239] Any method known in the art may be used in the art to assess the presence or absence of a SNP. Some suitable methods include, but are not limited to, sequencing, hybridization assays, polymerase chain reaction (PCR), ligase chain reaction (LCR), and genotyping-by-sequence (GBS), or combinations thereof.

[0240] Different PCR based methods are available to the person skilled of the art. One can use the RT-PCR method or the Kaspar method from KBioscience (LGC Group, Teddington, Middlesex, UK).

[0241] The KASP™ genotyping system uses three target specific primers: two primers, each of them being specific of each allelic form of the SNP (Single Nucleotide Polymorphism) and one other primer to achieve reverse amplification, which is shared by both allelic form. Each target specific primer also presents a tail sequence that corresponds with one of two FRET probes: one label with FAM® dye and the other with HEX® dye.

[0242] Successive PCR reactions are performed. The nature of the emitted fluorescence is used to identify the allelic form or forms present in the mix from the studied DNA.

[0243] The primers identified in Table 5 are particularly suitable for use with the KASP™ genotyping system. Of course, the skilled person may use variant primers or nucleic acid probes of the primers as identified in Table 5, said variant primers or nucleic acid probes having at least 90%, and preferably 95% sequence identity with any one of the primers as identified in Table 5, or with the DNA genomic fragment amplified by the corresponding set of primers as identified in Table 5.

[0244] Percentage of sequence identity as used herein is determined by calculating the number of matched positions in aligned nucleic acid sequences, dividing the number of matched positions by the total number of aligned nucleotides, and multiplying by 100. A matched position refers to a position in which identical nucleotides occur at the same position in aligned nucleic acid sequences. For example, nucleic acid sequences may be aligned using the BLAST 2 sequences (BI2seq) using BLASTN algorithms (www.ncbi.nlm.nih.gov).

[0245] As used herein, a primer encompasses any nucleic acid that is capable of priming the synthesis of a nascent nucleic acid in a template-dependent process, such as PCR. Typically, primers are oligonucleotides from 10 to 30 nucleotides, but longer sequences can be employed. Primers may be provided in double-stranded form though single-stranded form is preferred. Alternatively, nucleic acid probe can be used. Nucleic acid probe encompass any nucleic acid of at least 30 nucleotides and which can specifically hybridizes under standard stringent conditions with a defined nucleic acid. Standard stringent conditions as used herein refers to conditions for hybridization described for example in Sambrook et al 1989 which can comprise 1) immobilizing plant genomic DNA fragments or library DNA on a filter 2) prehybridizing the filter for 1 to 2 hours at 65° C. in 6×SSC 5×Denhardt's reagent, 0.5% SDS and 20 mg/ml denatured carrier DNA 3) adding the probe (labeled) 4) incubating for 16 to 24 hours 5) washing the filter once for 30 min at 68° C. in 6×SSC, 0.1% SDS 6) washing the filter three times (two times for 30 min in 30 ml and once for 10 min in 500 ml) at 68° C. in 2×SSC 0.1% SDS.

[0246] In specific embodiments, said primers for detecting the SNP markers of the present disclosure (specific for each allele “X” or “Y” or common) are as listed in the following table 5:

TABLE 5
Primers for use in detecting fertility restorer SNP
markers of the invention (as indicated in the primer name)

| SEQ | | |
|---|---|---|
| ID | | |
| NO | ID | Sequence |
| 3253 | cfn0238384 AlleleX | GAAGGTGACCAAGTTCATGCTGTAAAAAGATGTCT |
| | | GTGTGTCTAGC |
| 3254 | cfn0523109 AlleleX | GAAGGTGACCAAGTTCATGCTGGTGAACAAAACA |
| | | GGCCTACAATCA |
| 3255 | cfn0560679 AlleleX | GAAGGTGACCAAGTTCATGCTAATGATGTTTAACA |
| | | TTGGAACGGTCC |
| 3256 | cfn0917304 AlleleX | GAAGGTGACCAAGTTCATGCTGTGGTGGCGCTCT |
| | | ACCCG |
| 3257 | cfn0919993 AlleleX | GAAGGTGACCAAGTTCATGCTAAGTCATCGACTTA |
| | | CATGCTTCTTTG |
| 3258 | cfn0920459 AlleleX | GAAGGTGACCAAGTTCATGCTAGCCAAGGAAGCC |
| | | CAGATTTTC |
| 3259 | cfn1087371 AlleleX | GAAGGTGACCAAGTTCATGCTAGGGGAACTTTGG |
| | | GTATACACCA |
| 3260 | cfn1252000 AlleleX | GAAGGTGACCAAGTTCATGCTGTTAATGCTGTAG |
| | | CCATTCTTGCAA |
| 3261 | BWS0267 AlleleX | GAAGGTGACCAAGTTCATGCTTCAGCTGCATAAA |
| | | AAMCAGAATACCA |
| 3262 | cfn0524469 AlleleX | GAAGGTGACCAAGTTCATGCTGCACGTAGTAAGT |
| | | ATTGATTTTTCTGTG |
| 3263 | cfn0527067 AlleleX | GAAGGTGACCAAGTTCATGCTCAAATTACTTTTGT |
| | | TCTTTTATTTTTTTCGAAT |
| 3264 | cfn0527718 AlleleX | GAAGGTGACCAAGTTCATGCTAATTGTTCACAACA |
| | | TGGACATGAGAAC |
| 3265 | cfn1082074 AlleleX | GAAGGTGACCAAGTTCATGCTTACTGATAAAATCC |
| | | GGTTCAAATATATAAC |
| 3266 | cfn1239345 AlleleX | GAAGGTGACCAAGTTCATGCTGGCTTCTTTTTTCT |
| | | CCCTATAATATGGA |
| 3267 | cfn0554333 AlleleX | GAAGGTGACCAAGTTCATGCTGAGAGGCATCACA |
| | | TAGGCATAG |
| 3268 | cfn0436720 AlleleX | GAAGGTGACCAAGTTCATGCTATTCTTCATTCCTT |
| | | ACAACAAATATACCAAATT |
| 3269 | cfn0522096 AlleleX | GAAGGTGACCAAGTTCATGCTAGTAGAATACCAC |
| | | CCAATAAATCACTG |
| 3270 | cfn0523072 AlleleX | GAAGGTGACCAAGTTCATGCTCTAGCGCATGAGG |
| | | TCTATCG |
| 3271 | cfn0523990 AlleleX | GAAGGTGACCAAGTTCATGCTACATGAAGAGTGC |
| | | AGGCACACG |
| 3272 | cfn0524921 AlleleX | GAAGGTGACCAAGTTCATGCTATTGTTTCCATGTT |
| | | AAGCTTATATTGTGCA |
| 3273 | cfn0528390 AlleleX | GAAGGTGACCAAGTTCATGCTAAAAACATCTATTC |
| | | CAAGCAAGTATTAGTAAT |
| 3274 | cfn0530841 AlleleX | GAAGGTGACCAAGTTCATGCTTCTTGTTTATATAT |
| | | TCTCTTATCAGAAGTC |
| 3275 | cfn1122326 AlleleX | GAAGGTGACCAAGTTCATGCTGAATCTGATTAAGA |
| | | CGCTGGAGAAC |
| 3276 | cfn1249269 AlleleX | GAAGGTGACCAAGTTCATGCTGATTCAAAGAGGT |
| | | GACAAATATGTGTACT |
| 3277 | contig46312_253_ | |
| | BS00090770 | GAAGGTGACCAAGTTCATGCTGGTCGTAGCACAT |
| | AlleleX | AGCCGTTTAC |
| 3278 | 219K1_110042 | GAAGGTGACCAAGTTCATGCTACGGAATCGAGTC |
| | AlleleX | AACCAATTCCT |
| 3279 | cfn0373248 AlleleX | GAAGGTGACCAAGTTCATGCTAACAACAATTAYGA |
| | | GGATCAAATGGTCA |
| 3280 | cfn0527763 AlleleX | GAAGGTGACCAAGTTCATGCTATCTAGCCACGCA |
| | | AATGCCCGT |
| 3281 | cfn0556874 AlleleX | GAAGGTGACCAAGTTCATGCTAAAGAGCATGTCA |
| | | GACACAATGCAG |
| 3282 | cfn1097828 AlleleX | GAAGGTGACCAAGTTCATGCTGGTTCCTGAGAGA |
| | | GCAACCA |
| 3283 | cfn1246088 AlleleX | GAAGGTGACCAAGTTCATGCTGACATCTGATGAG |
| | | CCAGCATACA |
| 3284 | cfn1258380 AlleleX | GAAGGTGACCAAGTTCATGCTATCTACTCATCTAT |
| | | TGCAGATGCTCTT |
| 3285 | cfn1270524 AlleleX | GAAGGTGACCAAGTTCATGCTAAATGCCTAGTCTA |
| | | TACCTGATAAACTAAA |
| 3286 | cfn1287194 AlleleX | GAAGGTGACCAAGTTCATGCTACCTCCTCCGTAT |
| | | CTGATGGC |
| 3287 | cfn1288811 AlleleX | GAAGGTGACCAAGTTCATGCTTAATTTGGTTAACC |
| | | AAATCCTTTTTGATTTTT |
| 3288 | cfn1291249 AlleleX | GAAGGTGACCAAGTTCATGCTTCCCAGATTTAGC |
| | | ATGTGCATT |
| 3289 | cfn0231871 AlleleX | GAAGGTGACCAAGTTCATGCTACTGTATTAAATTA |
| | | GCTAGTGTGGCG |
| 3290 | cfn0393953 AlleleX | GAAGGTGACCAAGTTCATGCTAAAAACAAGTTGTC |
| | | ACCCAGATGAATC |
| 3291 | cfn0867742 AlleleX | GAAGGTGACCAAGTTCATGCTGCATCCTCGACAA |
| | | TGATTTCATCG |
| 3292 | cfn3126082 AlleleX | GAAGGTGACCAAGTTCATGCTAGATTTTAGCACCT |
| | | AACGCCGCAAA |
| 3293 | 104A4_105172 | GAAGGTGACCAAGTTCATGCTGTCGMACCCAATG |
| | AlleleX | AATAATGTTT |
| 3294 | 104A4_105588 | GAAGGTGACCAAGTTCATGCTGTTCCTTGTGACAT |
| | AlleleX | GTACTCATAA |
| 3295 | 136H5_3M5_138211 | GAAGGTGACCAAGTTCATGCTACTGGGTGCAAAG |
| | AlleleX | CCAAGATGATT |
| 3296 | 136H5_3M5_64154 | GAAGGTGACCAAGTTCATGCTGGCGAAACTTCGC |
| | AlleleX | CGCGATAAAT |
| 3297 | 136H5_3M5_68807 | GAAGGTGACCAAGTTCATGCTCAAGTTGCTCTTAA |
| | AlleleX | TTATCTGTGCGTA |
| 3298 | 136H5_3M5_7601 | GAAGGTGACCAAGTTCATGCTCGTCCCCCATGGC |
| | AlleleX | ACCTGT |
| 3299 | 136H5_3M5_77916 | GAAGGTGACCAAGTTCATGCTATAGCAAGTAGAG |
| | AlleleX | TTAACTTATCAAGTTATTA |
| 3300 | 136H5_3M5_89176 | GAAGGTGACCAAGTTCATGCTGGATTTTCTCACC |
| | AlleleX | GGCATCTCCA |
| 3301 | 136H5_3M5_89263 | GAAGGTGACCAAGTTCATGCTTCCCATGTTCTTTT |
| | AlleleX | TTTGCTCAAAAC |
| 3302 | 219K1_107461 | GAAGGTGACCAAGTTCATGCTATATTGTTTGTATT |
| | AlleleX | AAAAAGTTGTGTGTTTTGA |
| 3303 | 219K1_110005 | GAAGGTGACCAAGTTCATGCTGCCTTTTCTTCTTC |
| | AlleleX | CAGCATCTAC |
| 3304 | 219K1_111446 | GAAGGTGACCAAGTTCATGCTAGAATCGTTCTTC |
| | AlleleX | GAGAAGCACTCA |
| 3305 | 219K1_158251 | GAAGGTGACCAAGTTCATGCTCCTGGAGATGGAT |
| | AlleleX | CCGGTCAG |
| 3306 | 219K1_166464 | GAAGGTGACCAAGTTCATGCTCCTGAGCTGGGCT |
| | AlleleX | GCACC |
| 3307 | 219K1_37 | GAAGGTGACCAAGTTCATGCTAAAGGGCTATCCT |
| | | GGTGAACAAC |
| 3308 | 219K1_99688 | GAAGGTGACCAAGTTCATGCTGTTGCCCTGCGCA |
| | AlleleX | AAATCAAACTT |
| 3309 | 276113_96B22_97797 | GAAGGTGACCAAGTTCATGCTGTACTATGGCTAT |
| | AlleleX | GTCTCTGAATGC |
| 3310 | CAP7_c3847_204 | GAAGGTGACCAAGTTCATGCTCATTCGACGCGTC |
| | AlleleX | TTCCGCAATA |
| 3311 | Tdurum_contig50667_ | GAAGGTGACCAAGTTCATGCTGATGACATGGAGG |
| | 306 AlleleX | ATTATATCGACGA |
| 3312 | cfn0856945 AlleleX | GAAGGTGACCAAGTTCATGCTGCACATGCTTTATT |
| | | ACTGATCTGATTTG |
| 3313 | S100067637 | GAAGGTGACCAAGTTCATGCTCCAAATGTCCGAA |
| | AlleleX | TTCAGAGCAG |
| 3404 | S100069923 | GAAGGTGACCAAGTTCATGCTACATATACGCGAG |
| | AlleleX | CGCTCCTG |
| 3315 | S3045171 AlleleX | GAAGGTGACCAAGTTCATGCTGGTTCTTGGCACA |
| | | CTCCCCAG |
| 3316 | S3045222 AlleleX | GAAGGTGACCAAGTTCATGCTAACCTAAGTAGTAA |
| | | GCTTGCTGGGT |
| 3317 | cfn0238384 Allele | GAAGGTCGGAGTCAACGGATTGTAAAAAGATGTC |
| | Y | TGTGTGTCTAGG |
| 3318 | cfn0523109 Allele | GAAGGTCGGAGTCAACGGATTGTGAACAAAACAG |
| | Y | GCCTACAATCC |
| 3319 | cfn0560679 Allele | GAAGGTCGGAGTCAACGGATTCAATGATGTTTAA |
| | Y | CATTGGAACGGTCT |
| 3320 | cfn0917304 Allele | GAAGGTCGGAGTCAACGGATTGGTGGTGGCGCT |
| | Y | CTACCCT |
| 3321 | cfn0919993 Allele | GAAGGTCGGAGTCAACGGATTCAAGTCATCGACT |
| | Y | TACATGCTTCTTTT |
| 3322 | cfn0920459 Allele | GAAGGTCGGAGTCAACGGATTAGCCAAGGAAGC |
| | Y | CCAGATTTTG |
| 3323 | cfn1087371 Allele | GAAGGTCGGAGTCAACGGATTGGGGAACTTTGG |
| | Y | GTATACACCG |
| 3324 | cfn1252000 Allele | GAAGGTCGGAGTCAACGGATTGTTAATGCTGTAG |
| | Y | CCATTCTTGCAG |
| 3325 | BWS0267 Allele Y | GAAGGTCGGAGTCAACGGATTCAGCTGCATAAAA |
| | | AMCAGAATACCG |
| 3326 | cfn0524469 Allele | GAAGGTCGGAGTCAACGGATTGCACGTAGTAAGT |
| | Y | ATTGATTTTTCTGTT |
| 3327 | cfn0527067 Allele | GAAGGTCGGAGTCAACGGATTCAAATTACTTTTGT |
| | Y | TCTTTTATTTTTTTCGAAC |
| 3328 | cfn0527718 Allele | GAAGGTCGGAGTCAACGGATTATAAATTGTTCACA |
| | Y | ACATGGACATGAGAAT |
| 3329 | cfn1082074 Allele | GAAGGTCGGAGTCAACGGATTCTTACTGATAAAAT |
| | Y | CCGGTTCAAATATATAAT |
| 3330 | cfn1239345 Allele | GAAGGTCGGAGTCAACGGATTGCTTCTTTTTTCTC |
| | Y | CCTATAATATGGG |
| 3331 | cfn0554333 Allele | GAAGGTCGGAGTCAACGGATTGAGAGGCATCACA |
| | Y | TAGGCATAC |
| 3332 | cfn0436720 Allele | GAAGGTCGGAGTCAACGGATTCTTCATTCCTTACA |
| | Y | ACAAATATACCAAATC |
| 3333 | cfn0522096 Allele | GAAGGTCGGAGTCAACGGATTAGTAGAATACCAC |
| | Y | CCAATAAATCACTC |
| 3334 | cfn0523072 Allele | GAAGGTCGGAGTCAACGGATTAACTCTAGCGCAT |
| | Y | GAGGTCTATCA |
| 3335 | cfn0523990 Allele | GAAGGTCGGAGTCAACGGATTATACATGAAGAGT |
| | Y | GCAGGCACACT |
| 3336 | cfn0524921 Allele | GAAGGTCGGAGTCAACGGATTGTTTCCATGTTAA |
| | Y | GCTTATATTGTGCG |
| 3337 | cfn0528390 Allele | GAAGGTCGGAGTCAACGGATTAAACATCTATTCC |
| | Y | AAGCAAGTATTAGTAAC |
| 3338 | cfn0530841 Allele | GAAGGTCGGAGTCAACGGATTCTTCTTGTTTATAT |
| | Y | ATTCTCTTATCAGAAGTT |
| 3339 | cfn1122326 Allele | GAAGGTCGGAGTCAACGGATTGGAATCTGATTAA |
| | Y | GACGCTGGAGAAT |
| 3340 | cfn1249269 Allele | GAAGGTCGGAGTCAACGGATTCAAAGAGGTGACA |
| | Y | AATATGTGTACC |
| 3341 | contig46312 Allele | GAAGGTCGGAGTCAACGGATTAGGTCGTAGCACA |
| | Y_253_BS00090770 | TAGCCGTTTAT |
| 3342 | 219K1_110042 | GAAGGTCGGAGTCAACGGATTCGGAATCGAGTCA |
| | Allele Y | ACCAATTCCC |
| 3343 | cfn0373248 Allele | GAAGGTCGGAGTCAACGGATTAACAACAATTAYG |
| | Y | AGGATCAAATGGTCT |
| 3344 | cfn0527763 Allele | GAAGGTCGGAGTCAACGGATTCTAGCCACGCAAA |
| | Y | TGCCCGC |
| 3345 | cfn0556874 Allele | GAAGGTCGGAGTCAACGGATTGAAAGAGCATGTC |
| | Y | AGACACAATGCAA |
| 3346 | cfn1097828 Allele | GAAGGTCGGAGTCAACGGATTGGTTCCTGAGAGA |
| | Y | GCAACCG |
| 3347 | cfn1246088 Allele | GAAGGTCGGAGTCAACGGATTGACATCTGATGAG |
| | Y | CCAGCATACC |
| 3348 | cfn1258380 Allele | GAAGGTCGGAGTCAACGGATTCTACTCATCTATT |
| | Y | GCAGATGCTCTG |
| 3349 | cfn1270524 Allele | GAAGGTCGGAGTCAACGGATTAAATGCCTAGTCT |
| | Y | ATACCTGATAAACTAAT |
| 3350 | cfn1287194 Allele | GAAGGTCGGAGTCAACGGATTCACCTCCTCCGTA |
| | Y | TCTGATGGT |
| 3351 | cfn1288811 Allele | GAAGGTCGGAGTCAACGGATTAATTTGGTTAACC |
| | Y | AAATCCTTTTTGATTTTG |
| 3352 | cfn1291249 Allele | GAAGGTCGGAGTCAACGGATTCTTCCCAGATTTA |
| | Y | GCATGTGCATG |
| 3353 | cfn0231871 Allele | GAAGGTCGGAGTCAACGGATTCTACTGTATTAAAT |
| | Y | TAGCTAGTGTGGCT |
| 3354 | cfn0393953 Allele | GAAGGTCGGAGTCAACGGATTAAAAAAACAAGTT |
| | Y | GTCACCCAGATGAATT |
| 3355 | cfn0867742 Allele | GAAGGTCGGAGTCAACGGATTGGCATCCTCGACA |
| | Y | ATGATTTCATCT |
| 3356 | cfn3126082 Allele | GAAGGTCGGAGTCAACGGATTTTAGCACCTAACG |
| | Y | CCGCAAC |
| 3357 | 104A4_105172 | GAAGGTCGGAGTCAACGGATTCTGTCGMACCCAA |
| | Allele Y | TGAATAATGTTC |
| 3358 | 104A4_105588 | GAAGGTCGGAGTCAACGGATTGTTCCTTGTGACA |
| | Allele Y | TGTACTCATAC |
| 3359 | 136H5_3M5_1382 | GAAGGTCGGAGTCAACGGATTACTGGGTGCAAAG |
| | 11 Allele Y | CCAAGATGATA |
| 3360 | 136H5_3M5_64154 | GAAGGTCGGAGTCAACGGATTGCGAAACTTCGCC |
| | Allele Y | GCGATAAAC |
| 3361 | 136H5_3M5_68807 | GAAGGTCGGAGTCAACGGATTAAGTTGCTCTTAA |
| | Allele Y | TTATCTGTGCGTG |
| 3362 | 136H5_3M5_7601 | GAAGGTCGGAGTCAACGGATTGTCCCCCATGGCA |
| | Allele Y | CCTGC |
| 3363 | 136H5_3M5_77916 | GAAGGTCGGAGTCAACGGATTAGCAAGTAGAGTT |
| | Allele Y | AACTTATCAAGTTATTG |
| 3364 | 136H5_3M5_89176 | GAAGGTCGGAGTCAACGGATTTTCTCACCGGCAT |
| | Allele Y | CTCCG |
| 3365 | 136H5_3M5_89263 | GAAGGTCGGAGTCAACGGATTCTTCCCATGTTCT |
| | Allele Y | TTTTTTGCTCAAAAT |
| 3366 | 219K1_107461 | GAAGGTCGGAGTCAACGGATTATATTGTTTGTATT |
| | Allele Y | AAAAAGTTGTGTGTTTTGC |
| 3367 | 219K1_110005 | GAAGGTCGGAGTCAACGGATTCGCCTTTTCTTCTT |
| | Allele Y | CCAGCATCTAT |
| 3368 | 219K1_111446 | GAAGGTCGGAGTCAACGGATTAATCGTTCTTCGA |
| | Allele Y | GAAGCACTCC |
| 3369 | 219K1_158251 | GAAGGTCGGAGTCAACGGATTCCTGGAGATGGAT |
| | Allele Y | CCGGTCAA |
| 3370 | 219K1_166464 | GAAGGTCGGAGTCAACGGATTGCCTGAGCTGGG |
| | Allele Y | CTGCACT |
| 3371 | 219K1_37 Allele Y | GAAGGTCGGAGTCAACGGATTACAAAGGGCTATC |
| | | CTGGTGAACAAT |
| 3372 | 219K1_99688 | GAAGGTCGGAGTCAACGGATTGCCCTGCGCAAAA |
| | Allele Y | TCAAACTC |
| 3373 | 276I13_96B22_97797 | GAAGGTCGGAGTCAACGGATTAAGTACTATGGCT |
| | Allele Y | ATGTCTCTGAATGT |
| 3374 | CAP7_c3847_204 | GAAGGTCGGAGTCAACGGATTCGACGCGTCTTCC |
| | Allele Y | GCAATG |
| 3375 | Tdurum_contig50667_ | GAAGGTCGGAGTCAACGGATTATGACATGGAGGA |
| | 306 Allele Y | TTATATCGACGG |
| 3376 | cfn0856945 Allele | GAAGGTCGGAGTCAACGGATTGGCACATGCTTTA |
| | Y | TTACTGATCTGATTTT |
| 3377 | S100067637 Allele | GAAGGTCGGAGTCAACGGATTCCAAATGTCCGAA |
| | Y | TTCAGAGCAC |
| 3378 | S100069923 Allele | GAAGGTCGGAGTCAACGGATTGTACATATACGCG |
| | Y | AGCGCTCCTA |
| 3379 | S3045171 Allele Y | GAAGGTCGGAGTCAACGGATTGGTTCTTGGCACA |
| | | CTCCCCAA |
| 3380 | S3045222 Allele Y | GAAGGTCGGAGTCAACGGATTCCTAAGTAGTAAG |
| | | CTTGCTGGGC |
| 3381 | cfn0238384 | AGGGGGGCGTACGGGGTGA |
| | Common | |
| 3382 | cfn0523109 | GTGTGTGCTAATGTGGATATACGTAAGTT |
| | Common | |
| 3383 | cfn0560679 | GACGTTGAAGGGGGCATAGATCAAA |
| | Common | |
| 3384 | cfn0917304 | CAACTGCTTGGAGAAAGGCAACACAA |
| | Common | |
| 3385 | cfn0919993 | CCATTAACAAGTACTGCATAGGTGCATAT |
| | Common | |
| 3386 | cfn0920459 | CCTCCTCCTAATTAAGCTCCTATAGATA |
| | Common | |
| 3387 | cfn1087371 | CCCCCTTCTTCTTTCACTAGGGTAA |
| | Common | |
| 3388 | cfn1252000 | GTGCCCATAAGACGACTGGGACAA |
| | Common | |
| 3389 | BWS0267 | CTGCGTTAAGGTTCAGGCAACTGAT |
| | Common | |
| 3390 | cfn0524469 | GCCAATTTTCAAATCTAAGTCCACAGAGA |
| | Common | |
| 3391 | cfn0527067 | ATATGATTCACCCTAGATCCTTCACCTTA |
| | Common | |
| 3392 | cfn0527718 | GTTTCCTCCAATGTTCTTCCC |
| | Common | |
| 3393 | cfn1082074 | TGTCTCGCCTCGCTCTGGTTAATTT |
| | Common | |
| 3394 | cfn1239345 | ACCCTCGCTGCAGTTCCTTCTTAAA |
| | Common | |
| 3395 | cfn0554333 | AAATTCACACCATCATTGATCTGGGGTAT |
| | Common | |
| 3396 | cfn0436720 | GTCCACTGAGAATTAAGGATGCATTCTTT |
| | Common | |
| 3397 | cfn0522096 | AAGTAGTACTCGTAGAGAGTTAACACAGA |
| | Common | |
| 3398 | cfn0523072 | GCTTGACAATGATAATGCCCCCGAA |
| | Common | |
| 3399 | cfn0523990 | AATAACTCTTGTACTTCAGGATGAACGTTT |
| | Common | |
| 3400 | cfn0524921 | GCCCTTTGGTAATTCCATTTCAATCTTTT |
| | Common | |
| 3401 | cfn0528390 | GATGAGGAAGGTCTTCATGTTGGGTT |
| | Common | |
| 3402 | cfn0530841 | GAGCAGCACATCGTTAGCTGTTCTA |
| | Common | |
| 3403 | cfn1122326 | CAGATGGCCTAGTCGTGACATATCTT |
| | Common | |
| 3404 | cfn1249269 | TAAAAGAACACAAATGTGGCCCTAGTGAT |
| | Common | |
| 3405 | contig46312_ | GAAACATTCCTTCGGACAACTATGCATTA |
| | 253_BS00090770 | |
| | Common | |
| 3406 | 219K1_110042 | GCATCTTCAAGGGAGCCACTCAAAA |
| | Common | |
| 3407 | cfn0373248 | ATCATTGCCACGRAAAAAATCTCACAAGAT |
| | Common | |
| 3408 | cfn0527763 | CCTTGTCCACCGAGACATGTACAAA |
| | Common | |
| 3409 | cfn0556874 | CCTGCTGGAAATGGGATTTCTTGTTTATT |
| | Common | |
| 3410 | cfn1097828 | GCTTCCTCTCGGTAGCGATGGAT |
| | Common | |
| 3411 | cfn1246088 | GGGACGTGGAATTTGGAAAGACACAT |
| | Common | |
| 3412 | cfn1258380 | TATAGGAGTGATAGCACCACACAATTCAT |
| | Common | |
| 3413 | cfn1270524 | TGTACCGAAACTCAACCAAATGACCATTT |
| | Common | |
| 3414 | cfn1287194 | CAGAAGGCACTGGGAGGGGATT |
| | Common | |
| 3415 | cfn1288811 | GCACAATGTTTGACATTCGGTTTTCTAGTT |
| | Common | |
| 3416 | cfn1291249 | CTGACTGTCGTATCTTCAACATACTGATT |
| | Common | |
| 3417 | cfn0231871 | CCAAGGTATATGTGCCATTATCCTCAAA |
| | Common | |
| 3418 | cfn0393953 | CACTCACCGTCGACATTGACATAGTT |
| | Common | |
| 3419 | cfn0867742 | AGCCTCCGCGTCGTGATGGAAT |
| | Common | |
| 3420 | cfn3126082 | AAAGGGACAGCGATTTGATCTGG |
| | Common | |
| 3421 | 104A4_105172 | GCCATCCTCTCGGAGCCAGAA |
| | Common | |
| 3422 | 104A4_105588 | CAAGGATGGGGAGTATATGGCTCTT |
| | Common | |
| 3423 | 136H5_3M5_138211 | CCTCCCAACGGCCATCAATCAATTT |
| | Common | |
| 3424 | 136H5_3M5_64154 | GATCATCGGGGAACCTGATGATAGTT |
| | Common | |
| | Common | |
| 3425 | 136H5_3M5_68807 | TTGGTTGGTTACGTCAGGTTAAGACTTA |
| | Common | |
| 3426 | 136H5_3M5_7601 | CTTCTCTGTGGCCGAAAACCTCTT |
| | Common | |
| 3427 | 136H5_3M5_77916 | GCTKTAGACTCTAAGTACCACAGAAGAA |
| | Common | |
| 3428 | 136H5_3M5_89176 | CCTACCATCCTTAAATACTCTTGCTCAAA |
| | Common | |
| 3429 | 136H5_3M5_89263 | AAGCAACTAGAAAAATATTTGGACTAGCAT |
| | Common | |
| 3430 | 219K1_107461 | GTTGATGCGAATTTGAAAATGACATAATAA |
| | Common | |
| 3431 | 219K1_110005 | TTGACTCGATTCCGTGTGAGGCTAA |
| | Common | |
| 3432 | 219K1_111446 | AATATGATACAGACCCAAGACAAACCATTT |
| | Common | |
| 3433 | 219K1_158251 | TCCTCACAAATCACGGGCCCCT |
| | Common | |
| 3434 | 219K1_166464 | GACCGTGGTATATGCCACCACGTT |
| | Common | |
| 3435 | 219K1_37 | GGCTTCATTATCAAATTCTGACCCATCTT |
| | Common | |
| 3436 | 219K1_99688 | GGGCGGGACCTGACTTGATGAT |
| | Common | |
| 3437 | 276I13_96B22_97797 | ACGACAATATAGACAAATAAAACCAAACAA |
| | Common | |
| 3438 | CAP7_c3847_204 | CCGCGGCCGAAGCAGGCAA |
| | Common | |
| 3439 | Tdurum_contig50667_ | ATACATGTCGGCGTCCCAGTCC |
| | 306 Common | |
| 3440 | cfn0856945 | GGTGTAGGCAAACCTAAAATAAACAGTCAA |
| | Common | |
| 3441 | S100067637 | CAACGCCAAACGCCAACGCCAT |
| | Common | |
| 3442 | S100069923 | GCCTTGTACTGCAGTGAAGTGTGAT |
| | Common | |
| 3443 | S3045171 | TGACGGCTGCGAGGACGAGAAT |
| | Common | |
| 3444 | S3045222 | AGTCCAGAGTTACAGGACATGGCTA |
| | Common | |

[0247] Use of the Wheat Plants of the Disclosure

[0248] The plant according to the disclosure can be crossed, with any another inbred line, in order to produce a new line comprising either an increase or a decrease in the fertility level. Alternatively, a genetic trait which has been engineered into a particular line using the foregoing techniques could be moved into another line using traditional backcrossing techniques that are well known in the plant breeding arts. For example, a backcrossing approach could be used to move an engineered trait from a public, non-elite inbred line into an elite inbred line, or from an inbred line containing a foreign gene in its genome into an inbred line or lines which do not contain that gene. As used herein, “crossing” can refer to a simple X by Y cross, or the process of backcrossing, depending on the context.

[0249] The wheat plant of the disclosure is a also a wheat plant wherein one or more desired traits have further been introduced through backcrossing methods, whether such trait is a naturally occurring one or not.

[0250] The disclosure also relates to the use of the wheat plant as described above or its seeds, for food applications, preferably for flour production and for feed applications, or for breeding applications, for example for use as a parent plant in breeding for improving agronomical value of a wheat plant, line, hybrid or variety.

[0251] As used herein, breeding applications encompass pedigree breeding to improve the agronomical value of a plant, line, hybrid, or variety.

[0252] The wheat plants disclosed herein are further useful, for example, for producing flour or for feed applications.

[0253] Seeds harvested from plants described herein can be used to make flour by any available techniques in the art. The wheat plants or their flour are also useful as food compositions, for human or animal.

[0254] The Examples below are given for illustration purposes only.

### Specific Embodiments

[0255] 1. An isolated nucleic acid encoding a protein restorer of fertility of T. timopheevii, wherein the corresponding amino acid sequence has at least 95% identity to an amino acid sequence chosen amongst any one of SEQ ID NO:1 to SEQ ID NO:1554.
[0256] 2. The nucleic acid of Embodiment 1, encoding a Rf1 protein restorer of fertility of T. timopheevii CMS cytoplasm, wherein the corresponding amino acid sequence has at least 95% identity, preferably at least 96%, 97%, 98%, 99% or 100% identity to an amino acid sequence selected from the group consisting of SEQ ID NOs1-2, SEQ ID NOs288-290, SEQ ID NOs293-296, SEQ ID NOs343-346, SEQ ID NOs349-354, SEQ ID NOs359, 361 and 362, SEQ ID NOs 396 and 397, SEQ ID NOs428-430, SEQ ID NO517 and 519, SEQ ID NOs752-754, SEQ ID NOs1092, 1093 and 1095.
[0257] 3. The nucleic acid of Embodiment 1, encoding a Rf1 protein restorer of fertility of T. timopheevii CMS cytoplasm, wherein the corresponding amino acid sequence has at least 95% identity, preferably at least 96%, 97%, 98%, 99% or 100% identity to SEQ ID NO:361.
[0258] 4. The nucleic acid of claim 1, encoding a Rf3 protein restorer of fertility of T. timopheevii CMS cytoplasm, wherein the corresponding amino acid sequence has at least 95% identity, preferably at least 96%, 97%, 98%, 99% or 100% identity to an amino acid selected from the group consisting of SEQ ID NOs:124 and 125, SEQ ID NO:147, SEQ ID NO:150, SEQ ID NO:156, SEQ ID NO:158, SEQ ID NO:297, SEQ ID NO:299, SEQ ID NOs:315-321, SEQ ID NOs:379-381, SEQ ID NOs:553 and 554, SEQ ID NOs:557 and 558, SEQ ID NOs:676 and 677, SEQ ID NOs:684 and 685, SEQ ID NOs:696 and 697, SEQ ID NOs:938 and 939 and SEQ ID NOs:1038 and 1039.
[0259] 5. The nucleic acid of Embodiment 4, encoding Rf3 protein restorer of fertility of T. timopheevii CMS cytoplasm, wherein the corresponding amino acid sequence has at least 95% identity, preferably at least 96%, 97%, 98%, 99% or 100% identity to an amino acid selected from the group consisting of SEQ ID NO: 158, SEQ ID NO: 676 and SEQ ID NO:684.
[0260] 6. The nucleic acid of Embodiment 1, encoding a Rf4 protein restorer of fertility of T. timopheevii CMS cytoplasm, wherein the corresponding amino acid sequence has at least 95% identity, preferably at least 96%, 97%, 98%, 99% or 100% identity to an amino acid selected from the group consisting of SEQ ID NO:477 and SEQ ID NOs3135-3138.
[0261] 7. The nucleic acid of Embodiment 1, encoding a Rf7 protein restorer of fertility of T. timopheevii CMS cytoplasm, wherein the corresponding amino acid sequence has at least 95% identity, preferably at least 96%, 97%, 98%, 99% or 100% identity to an amino acid sequence selected from the group consisting of SEQ ID NOs:240-243, SEQ ID NOs303-305, SEQ ID NO:363, SEQ ID NOs375-377, SEQ ID NOs497-499, SEQ ID NO:516, SEQ ID NOs709-711, SEQ ID NO:768.
[0262] 8. The nucleic acid of Embodiment 1 encoding for a Rf-rye protein restorer of fertility of T. timopheevii CMS cytoplasm, wherein the corresponding amino acid sequence has at least 95% identity, preferably at least 96%, 97%, 98%, 99% or 100% identity to an amino acid sequence selected from the group consisting of SEQ ID NO:227, SEQ ID NO:378 and SEQ ID NO:859.
[0263] 9. A recombinant nucleic acid comprising a nucleic acid encoding a protein restorer of T. timopheevii CMS cytoplasm of any one of Embodiments 1 to 8, operably linked to regulatory elements.
[0264] 10. A vector for use in transformation of a wheat plant, comprising the recombinant nucleic acid of Embodiment 9.
[0265] 11. A wheat transgenic plant comprising one or more nucleic acid(s) of any one of Embodiments 1-9, as transgenic element(s).
[0266] 12. The wheat transgenic plant of Embodiment 11, which is a fertile wheat plant restorer of T. timopheevii CMS cytoplasm and comprising a combination of at least two different transgenic elements, selected from the group consisting of Rf1, Rf3, Rf7 and Rf-rye nucleic acids of any one of Embodiments 1-9.
[0267] 13. The transgenic wheat plant of Embodiment 11 or 12, wherein said transgenic plant includes the following combination of nucleic acids as transgenic elements:
   [0268] a. a Rf1 nucleic acid encoding an amino acid sequence having at least 95% identity to any one of SEQ ID NOs359, 361, 362 or SEQ ID NOs428-430, and Rf3 nucleic acid encoding an amino acid sequence having at least 95% identity to any one of SEQ ID NOs:315-321, SEQ ID NOs:379-381, SEQ ID NOs:147 and 150, SEQ ID NOs:156 and 158, SEQ ID NOs297 and 299, SEQ ID NO:676 and SEQ ID NO:684,
   [0269] b. a Rf1 nucleic acid encoding an amino acid sequence having at least 95% identity to any one of SEQ ID NOs359, 361, 362 or SEQ ID NOs428-430, and Rf7 nucleic acid encoding an amino acid sequence having at least 95% identity to any one of SEQ ID NO:363, SEQ ID NO:516 and SEQ ID NO:768,
   [0270] c. a Rf1 nucleic acid encoding an amino acid sequence having at least 95% identity to any one of SEQ ID NOs359, 361, 362 or SEQ ID NOs428-430, and Rf-rye nucleic acid encoding an amino acid sequence having at least 95% identity to any one of SEQ ID NO:227, SEQ ID NO:378 and SEQ ID NO:859,
   [0271] d. a Rf3 nucleic acid encoding an amino acid sequence having at least 95% identity to any one of SEQ ID NOs:315-321, SEQ ID NOs:379-381, SEQ ID NOs:147 and 150, SEQ ID NOs:156 and 158, SEQ ID NOs297 and 299, SEQ ID NO:676 and SEQ ID NO:684, and Rf7 nucleic acid encoding an amino acid sequence having at least 95% identity to SEQ ID NO:363, SEQ ID NO:516 and SEQ ID NO:768,
   [0272] e. a Rf3 nucleic acid encoding an amino acid sequence having at least 95% identity to any one of SEQ ID NOs:315-321, SEQ ID NOs:379-381, SEQ ID NOs:147 and 150, SEQ ID NOs:156 and 158, SEQ ID NOs297 and 299, SEQ ID NO:676 and SEQ ID NO:684, and Rf-rye nucleic acid encoding an amino acid sequence having at least 95% identity to any one of SEQ ID NO:227, SEQ ID NO:378 and SEQ ID NO:859,
   [0273] f. a Rf7 nucleic acid encoding an amino acid sequence having at least 95% identity to SEQ ID NO:363, SEQ ID NO:516 and SEQ ID NO:768, and Rf-rye nucleic acid encoding an amino acid sequence having at least 95% identity to any one of SEQ ID NO:227, SEQ ID NO:378 and SEQ ID NO:859,
   [0274] g. a Rf1 nucleic acid encoding an amino acid sequence having at least 95% identity to any one of SEQ ID NOs359, 361, 362 or SEQ ID NOs428-430, and Rf3 nucleic acid encoding an amino acid sequence having at least 95% identity to any one of SEQ ID NOs:315-321, SEQ ID NOs:379-381, SEQ ID NOs:147 and 150, SEQ ID NOs:156 and 158, SEQ ID NOs297 and 299, SEQ ID NO:676 and SEQ ID NO:684, and Rf7 nucleic acid encoding an amino acid sequence having at least 95% identity to any one of SEQ ID NO:363, SEQ ID NO:516 and SEQ ID NO:768;
   [0275] h. a Rf1 nucleic acid encoding an amino acid sequence having at least 95% identity to any one of SEQ ID NOs359, 361, 362 or SEQ ID NOs428-430, and Rf3 nucleic acid encoding an amino acid sequence having at least 95% identity to any one of SEQ ID NOs:315-321, SEQ ID NOs:379-381, SEQ ID NOs:147 and 150, SEQ ID NOs:156 and 158, SEQ ID NOs297 and 299, SEQ ID NO:676 and SEQ ID NO:684, and Rf-rye nucleic acid encoding an amino acid sequence having at least 95% identity to any one of SEQ ID NO:227, SEQ ID NO:378 and SEQ ID NO:859;
   [0276] i. a Rf1 nucleic acid encoding an amino acid sequence having at least 95% identity to any one of SEQ ID NOs359, 361, 362 or SEQ ID NOs428-430, and Rf7 nucleic acid of Embodiment 4 encoding an amino acid sequence having at least 95% identity to any one of SEQ ID NO:363, SEQ ID NO:516 and SEQ ID NO:768, and Rf-rye nucleic acid encoding an amino acid sequence having at least 95% identity to any one of SEQ ID NO:227, SEQ ID NO:378 and SEQ ID NO:859; or,
   [0277] j. a Rf3 nucleic acid encoding an amino acid sequence having at least 95% identity to any one of SEQ ID NOs:315-321, SEQ ID NOs:379-381, SEQ ID NOs:147 and 150, SEQ ID NOs:156 and 158, SEQ ID NOs297 and 299, SEQ ID NO:676 and SEQ ID NO:684, and Rf7 nucleic acid encoding an amino acid sequence having at least 95% identity to any one of SEQ ID NO:363, SEQ ID NO:516 and SEQ ID NO:768, and Rf-rye nucleic acid encoding an amino acid sequence having at least 95% identity to any one of SEQ ID NO:227, SEQ ID NO:378 and SEQ ID NO:859.
[0278] 14. The transgenic wheat plant of Embodiment 13, which further contains a Rf4 nucleic acid encoding a Rf4 protein restorer of fertility of T. timopheevii CMS cytoplasm, in combination with one, two, three or four of any of the restorer nucleic acid encoding Rf1, Rf3, Rf7 or Rf-rye protein, wherein the corresponding amino acid sequence has at least 95% identity, preferably at least 96%, 97%, 98%, 99% or 100% identity to an amino acid selected from the group consisting of SEQ ID NO:477 and SEQ ID NOs3135-3138.
[0279] 15. The transgenic wheat plant of any one of Embodiments 11-14, wherein said one or more transgenic element(s) express polypeptides which restore or improve male fertility to the plant as compared to the parent plant without such transgenic element(s).
[0280] 16. Method for producing a wheat transgenic plant of any one of Embodiments 11-15, wherein the method comprises the steps of transforming a parent wheat plant with one or more nucleic acids encoding protein restorer of T. timopheevii CMS cytoplasm according to any one of Embodiments 1-9, selecting a plant comprising said one or more nucleic acid(s) as transgene(s), regenerating and growing said wheat transgenic plant.
[0281] 17. A method for producing a wheat plant carrying a Rf3 restorer of fertility, said method comprising (i) providing a parent wheat plant comprising in its genome at least a 163 bp fragment of SEQ ID NO:3174, and (ii) deleting a region of at least 10 bp in said fragment of SEQ ID NO:3174, for example at least 20 bp, 30 bp, 40 bp, 50 bp, 60 bp, 70 bp, 80 bp, 90 bp, 100 bp, 110 bp, 120 bp, 130 bp, 140 bp, 150 bp, 160 bp or the whole fragment of SEQ ID NO:3174 in the genome of said wheat plant, thereby obtaining said wheat plant carrying a Rf3 restorer of fertility.
[0282] 18. The method of Embodiment 17, wherein the fertility score of the obtained wheat plant has a fertility score higher than the parent wheat plant.
[0283] 19. The method of Embodiment 17 or 18, wherein the parent wheat plant has a fertility score below 1, for example comprised between 0.5 and 1.0 and the obtained wheat plant has a fertility score above 1.0, for example comprised between 1.0 and 2.0.
[0284] 20. A wheat plant carrying Rf3 restorer of fertility, as obtained by the method of any one of Embodiments 17-19, wherein only a part but not the whole genomic fragment of SEQ ID NO:3174 is deleted in the genome of said wheat plant.
[0285] 21. A method for assessing fertility restoration in a wheat plant, said method comprising determining the presence or absence of a fragment of SEQ ID NO:3174 in the genome of said plant, wherein the presence of the whole fragment is indicative of a weak restoration of fertility and a deletion of at least a part of such fragment or the whole fragment of SEQ ID NO:3174 is indicative of a strong restoration of fertility.
[0286] 22. A nucleic acid probe for use in a method of any one of Embodiments 17-21, characterized it consists of a nucleic acid of at least 10 nucleotides within SEQ ID NO:3174.
[0287] 23. A wheat plant restorer of fertility of T. timopheevii CMS cytoplasm, wherein the plant comprises at least three fertility restorer alleles within the restorer loci chosen amongst Rf1, Rf3, Rf4 and Rf7 wherein,
   [0288] a. the Rf1 locus is located at most 10 cM from marker cfn0522096 of SEQ ID NO:3190 or marker cfn05277067 of SEQ ID NO: 3196,
   [0289] b. the Rf3 locus is located at most 10 cM from marker cfn1249269 of SEQ ID NO:3205 or marker BS00090770 of SEQ ID NO:3228,
   [0290] c. the Rf7 locus is located at most 10 cM from marker cfn0919993 of SEQ ID NO:3231, and,
   [0291] d. the Rf4 locus is located at most 10 cM from marker cfn0393953 of SEQ ID NO:3233.
[0292] 24. The wheat plant of Embodiment 23, wherein the plant comprises the Rf1, Rf3 and Rf7 restorer alleles.
[0293] 25. The wheat plant of any one of Embodiments 23 to 24, characterized in that it includes at least one Rf1 restorer allele within the Rf1 locus, said Rf1 restorer allele being located within the chromosomal interval between SNP markers cfn0522096 of SEQ ID NO:3190 and cfn05277067 of SEQ ID NO:3196.
[0294] 26. The wheat plant of Embodiment 25, wherein said Rf1 locus is characterized by the presence of one or more of the following SNP allele(s):

| | | Marker SEQ ID | |
|---|---|---|---|
| SNP# | Marker Name | NO: | Restorer Allele |
| SNP1 | cfn523072 | 3187 | T |
| SNP2 | cfn0523109 | 3188 | A |
| SNP3 | 276I13_96B22_97797 | 3189 | C |
| SNP4 | cfn0522096 | 3190 | C |
| SNP5 | cfn0527763 | 3191 | C |
| SNP6 | 104A4_105172 | 3192 | TG |
| SNP7 | 104A4_105588 | 3193 | A |
| SNP8 | cfn0373248 | 3194 | T |
| SNP9 | cfn1097828 | 3195 | C |
| SNP10 | cfn0527067 | 3196 | A |
| SNP11 | cfn0528390 | 3197 | G |
| SNP12 | BWS0267 | 3198 | A |
| SNP13 | cfn0527718 | 3199 | T |
| SNP14 | cfn0524469 | 3200 | G |
| SNP15 | cfn0524921 | 3201 | G |
| SNP16 | cfn1122326 | 3202 | C |

[0295] 27. The wheat plant of Embodiment 26, wherein the Rf1 locus is characterized by the haplotype “C” and “A” of the SNP3 and SNP7 restorer alleles as described in the table of Embodiment 5.
[0296] 28. The wheat plant of any one of Embodiments 23 to 27, characterized in that it includes at least one Rf3 restorer allele within the Rf3 locus, said Rf3 restorer allele being located within the chromosomal fragment between SNP markers cfn1249269 and BS00090770.
[0297] 29. The wheat plant of Embodiment 28, wherein said Rf3 locus is characterized by the presence of one or more of the following SNP allele(s):

| SNP# | Marker Name | Marker SEQ ID | Restorer Allele |
|---|---|---|---|
| SNP17 | cfn1252000 | 3203 | A |
| SNP18 | IWB14060* | 3204 | G |
| SNP19 | cfn1249269 | 3205 | G |
| SNP20 | 219K1_166464 | 3206 | T |
| SNP21 | 219K1_158251 | 3207 | G |
| SNP22 | 219K1_111446 | 3208 | A |
| SNP23 | 219K1_110042 | 3209 | T |
| SNP24 | 219K1_110005 | 3210 | C |
| SNP25 | 219K1_107461 | 3211 | A |
| SNP26 | 219K1_99688 | 3212 | T |
| SNP27 | 219K1_37 | 3213 | C |
| SNP28 | cfn1270524 | 3214 | T |
| SNP29 | 136H5_3M5_7601 | 3215 | T |
| SNP30 | cfn1288811 | 3216 | G |
| SNP31 | 136H5_3M5_89176 | 3217 | A |
| SNP32 | 136H5_3M5_89263 | 3218 | T |
| SNP33 | 136H5_3M5_138211 | 3219 | T |
| SNP34 | cfn0556874 | 3220 | C |
| SNP35 | 136H5_3M5_64154 | 3221 | C |
| SNP36 | 136H5_3M5_68807 | 3222 | G |
| SNP37 | 136H5_3M5_77916 | 3223 | A |
| SNP38 | cfn1246088 | 3224 | A |
| SNP39 | cfn1287194 | 3225 | G |
| SNP40 | cfn1258380 | 3226 | A |
| SNP41 | IWB72107* | 3227 | A |
| SNP42 | BS00090770 | 3228 | T |
| SNP43 | cfn1239345 | 3229 | A |

[0298] 30. The wheat plant of Embodiment 29, wherein the Rf3 locus is characterized by the haplotype “T” and “A” of the SNP29 and SNP31 restorer alleles as described in the table of Embodiment 7.
[0299] 31. The wheat plant of any one of Embodiments 23 to 30, wherein the Rf7 locus is characterized by the presence of one or more of the following restorer SNP allele(s):

| SNP# | Marker Name | Marker SEQ ID | Restorer Allele |
|---|---|---|---|
| SNP44 | cfn0917304 | 3230 | T |
| SNP45 | cfn0919993 | 3231 | G |
| SNP46 | cfn0920459 | 3232 | C |
| SNP49 | cfn0915987 | 3445 | G |
| SNP50 | cfn0920253 | 3446 | A |
| SNP51 | cfn0448874 | 3447 | T |
| SNP52 | cfn0923814 | 3448 | C |
| SNP53 | cfn0924180 | 3449 | G |
| SNP54 | cfn0919484 | 3450 | G |

[0300] 32. The wheat plant of any one of Embodiments 23 to 31, wherein the Rf4 locus is characterized by the presence of one or more of the following SNP allele(s), preferably by the haplotype “C” and “G” of the SNP47 and SNP48 restorer alleles:

| SNP# | Marker Name | Marker SEQ ID | Restorer Allele |
|---|---|---|---|
| SNP47 | cfn0393953 | 3233 | C |
| SNP48 | cfn0856945 | 3234 | G |

[0301] 33. The wheat plant of any one of Embodiments 23-32, wherein representative alleles of Rf1, Rf3, Rf4 and Rf7 restorer alleles are provided by the seed sample chosen amongst: NCIMB 42811, NCIMB 42812, NCIMB 42813, NCIMB 42814, NCIMB 42815, NCIMB 42816, and NCIMB 42817.
[0302] 34. The wheat plant according to any one of the Embodiments 23 to 33, wherein said wheat plant is alloplasmic and comprises the T. timopheevii cytoplasm.
[0303] 35. A method of identifying a wheat plant according to any one of Embodiments 23 to 34, wherein said wheat plant is identified by detecting the presence of at least one restorer allele genetically associated with the restorer loci chosen amongst Rf1, Rf3, Rf4 and Rf7 loci.
[0304] 36. Means for detecting one or more of SNPs of SEQ ID NOs 3187-3235.
[0305] 37. The means according to Embodiment 36 consisting of one or more primers including any one of the following: SEQ ID NOs 3253-3444.
[0306] 38. Method of production of a wheat hybrid plant comprising the steps of:
   [0307] a. crossing a sterile female wheat plant comprising the T.timopheevii cytoplasm with a fertile male wheat plant according to any one of Embodiments 23 to 34;
   [0308] b. collecting the hybrid seed;
   [0309] c. optionally detecting the presence of T.timopheevii cytoplasm, and/or at least three of the Rf locus chosen amongst Rf1, Rf3, Rf4 and Rf7 in the hybrid seed; and,
   [0310] d. optionally detecting hybridity level of the hybrid seed.

### LEGENDS OF THE FIGURES

[0311] FIGS. 1A and 1B is a table showing a summary of plant genomes used in the study and number of identified RFLs. In total, the analyses encompassed 16 genome data sets from Triticeae and 13 from Oryzeae, respectively, as well as single data sets from Brachypodium distachyon, tef (Eragrostis tef), rye (Secale cereale), foxtail millet (Setaria italica), sorghum (Sorghum bicolor) and maize (Zea mays). Lolium perenne and Triticum turgidum transcriptome data sets were used as well.

[0312] FIG. 2: Processing of orf256 in T-CMS wheat mitochondria (A) Structure of orf256 identified in the T. timopheevii mitochondrial genome. The binding site of the WORF256 probe (Song and Hedgoth 1994) used in the Northern blot analysis is indicated. (B) Differential processing of the orf256 in wheat lines with different restoring capabilities. No orf256 transcript was detected in T. aestivum, Primepii, Anapurna and Wheat-Rye-6R (WR_6R) lines. An additional, third band detected in R197 and R0934F accessions is indicated by asterisks. As a control for gel loading the picture of ethidium bromide (EtBr) stained agarose gel is shown.

[0313] FIG. 3: FIG. 3 shows the list of RFL groups potentially corresponding to the Rf4 gene.

[0314] FIGS. 4a and 4b: FIGS. 4A and 4B show respectively the alignment between nucleotide and amino acid sequences of RFL120-spelt (Subject) with RFL120-timo (Query).

[0315] FIG. 5A: FIG. 5A shows the protein sequence alignment of RFL29a, RFL29b, RFL29c_1 and RFL29c_2.

[0316] FIGS. 5B and 5C: FIGS. 5B and 5C respectively, show the protein sequence alignments of RFL164a and RFL164b, and RFL166a and RFL166b.

[0317] FIG. 6: FIG. 6 shows an alignment of the 5′UTR regions as identified in the RFL29a and RFL29b genes

[0318] FIG. 7: FIG. 7 shows the position of the different target sequences around and within the 163 bp region identified for different endonucleases.

[0319] FIG. 8: The FIG. 8 shows the relative position of the Rf1 mapping intervals identified on our internal consensus genetic map.

[0320] FIG. 9: The FIG. 9 shows the relative position of the Rf3 mapping intervals identified on our internal consensus genetic map.

[0321] FIG. 10: The FIG. 10A shows position of the markers within the chromosomal interval of Rf1 locus. Left and right refer to the marker positions relative to the interval defined by cfn0522096 and cfn0527067 SNP markers. Interval refers to markers located within the mapping interval. The physical positions correspond to LG internal ordering of the scaffolds of the IWGSC Whole genome assembly, ‘IWGSC WGA’.

[0322] The FIGS. 10B, 100, 10D show a subset of the diversity panel showing the haplotypes at the Rf1 locus for the restorer lines used in the genetic mapping (R197, R204, R0932E), derived lines LGWR16-0016 and LGWR16-0026 and a collection of maintainer lines. “-”: correspond to dominant markers with no amplification in several maintainer lines. “H”: means heterozygote status wherein two alleles are detected.

[0323] FIG. 11: The FIG. 11A shows the position of the markers within the chromosomal interval of Rf3 locus. Left and right refer to the marker positions relative to the interval defined by cfn1249269 and BS00090770 markers. Interval refers to markers located within the mapping interval. The physical positions correspond to LG internal ordering of the scaffolds of the IWGSC Whole genome assembly, ‘IWGSC WGA’. *IWB14060 and IWB72107 are described in Geyer and al, 2016.

[0324] The FIGS. 11B, 11C, 11D show a subset of the diversity panel showing the haplotypes at the Rf3 locus for the restorer lines LGWR16-0016 and LGWR16-0026, the TJB155 line used as restorer parental line in Rf3 QTL mapping and a series of maintainer lines.

[0325] “-” corresponds to dominant markers with no amplification in several maintainer lines. “H” means heterozygote status wherein two alleles are detected.

[0326] FIG. 12: The FIG. 12 shows nucleotide sequence alignment between RFL29a and RFL29c fragment sequences. The PAM motif and target sequence for CRISPR edition are respectively is in bold and underligned.

### EXAMPLES

### Example 1: Identification of 1188 RFL-PPR Sequences in Cereals

[0327] 32 genomic and two transcriptome data sets from 27 cereal plant species and their wild relatives were downloaded from the public sequence depositories and analysed. A complete list of files and databases from which they were downloaded is presented in FIG. 1.

[0328] The DNA sequences were screened for open reading frames (ORFs) in six-frame translations with the getorf program of the EMBOSS 6.6.0 package (Rice et al., 2000). Predicted ORFs longer than 92 codons were screened for the presence of P- and PLS-class pentatricopeptide repeat (PPR) motifs using hmmsearch from the HMMER 3.1b package (hmmer.org) and hidden Markov models defined by hmmbuild (Cheng et al., 2016). The post-processing of hmmsearch results was carried out according to rules described previously (Cheng et al., 2016). Sequences containing 10 or more P-class PPR motifs were retained for further analysis, as a previous study has shown that Restorer-to-Fertility-Like (RFL) genes are primarily comprised of tandem arrays of 15 to 20 PPR motifs (Fujii et al., 2011).

[0329] For identification of RFL sequences among the P-class PPRs, the OrthoMCL algorithm (Li et al., 2003) was used via the OrthoMCL-DB website to cluster P-class PPR proteins from each data set (http://www.orthomcl.org/orthomcl/). The resulting output files were screened for groups containing reference RFLs (Fujii et al., 2011).

[0330] In total, 633 RFLs were identified in the 34 cereal data sets by OrthoMCl analysis (see Table of FIGS. 1A and 1B). In addition, WGS data sets of 44 sorghum accessions including landraces and wild relatives (Mace et al., 2013) were analyzed and 517 additional RFL sequences were identified and included in the study (see Table of FIGS. 1A and B).

### Example 2: Identification of Full Length RFL PPR Genes Potentially Involved in Fertility Restoration of T. timopheevii CMS in Wheat by Targeted Capture of RFL Genes

[0331] A. Selection of Germplasm Accessions:

[0332] Six wheat accessions were identified as potential restorer lines of Timopheevii-type CMS (T-CMS) derived from the interspecific cross between Triticum timopheevi and Triticum aestivum.

[0333] The first accession is a wheat-rye addition line, “Wheat-Rye-6R”, wherein the Rf gene was mapped on the additional long arm of 6R chromosome of rye Secale cereale (Curtis and Lukaszewski, 1993). Four other wheat accessions are characterized by the presence of at least one of the mapped restorer genes in wheat: Rf1, Rf3 and Rf7. The commercial variety, Primepii, carries the Rf3 gene, and three Limagrain lines R197, R0934F and R0932E respectively carry both Rf1 and Rf7 genes, Rf3 or Rf1.

[0334] The sixth accession, named Anapurna, is a maintainer line not able to restore T-CMS and carries no known Rf genes. Anapurna is considered as the negative control in this experiment. In addition, a T. timopheevii line was included in the study as it is a fertile line expected to harbor more than one Rf gene able to restore T-type CMS (Wilson and Ross, 1962). To some extent, this line is considered as a positive control in this experiment.

[0335] All six accessions were verified in regard to their restorer status by genetic analysis.

[0336] Northern blot analysis was performed with restorer and sterile accessions using an orf256-specific probe (FIG. 2A). Orf256 was previously identified as a gene specific to the T. timopheevii mitochondrial genome (Rathburn and Hedgcoth, 1991; Song and Hedgcoth, 1994). The sequence from −228 to +33 of orf256 (numbering relative to the start codon) is identical to the homologous region of the coxI gene (encoding subunit 1 of mitochondrial complex IV) in T. aestivum, whereas the rest of orf256, including the 3′ flanking region, is unrelated to coxI (FIG. 2A). Different patterns of orf256 transcript processing in the fertile T. timopheevii line and fertile restorer lines carrying the T. timopheevii cytoplasm were observed when compared to the sterile CMS line pattern which is coherent with the genetic analysis (FIG. 2B). The different processing patterns are consistent with (but not conclusive proof that) orf256 is involved in causing CMS.

[0337] B. Bait Design and RFL-Capture from Different Wheat Genotypes:

[0338] The 1188 RFL PPR sequences identified by our bioinformatics analysis underwent a pre-treatment process that included masking of the target sequences against wheat mitochondrial and chloroplastic genome sequences (accessions NC_007579.1 and AB042240) as well as repeated elements of wheat genome. The masked target sequences were used for capture probe design. Briefly, probes were designed to cover the target sequences with a frequency masking algorithm intended to rule out probes that match with high copy number sequences in the targeted genome(s). The final probes were synthetized as a probe pool.

[0339] Seeds of each accession were sown and plantlets were grown in etiolated conditions. After DNA extraction, Illumina libraries (referred to as NGS libraries) were prepared from DNA fragments around 600 bp with the KAPA Biosystems chemistry according to the manufacturer's recommendations.

[0340] The NGS libraries were then specifically enriched in RFL sequences using the probe pool and a capture protocol. The efficiency of the capture was confirmed by a specific qPCR assay and ultimately libraries were pooled and sequenced in paired-end mode with 300 nt read length on a MiSeq platform.

[0341] C. Assembly of Full-Length Gene Sequences Encoding RFL Proteins and Identification of Putative Orthologous Groups:

[0342] Sequence reads from the RFL capture experiment were assembled into full-length contigs spanning one or more sequences encoding RFL proteins as described below. Overlapping paired reads were merged into a single sequence using bbmerge from the bbmap package (https://sourceforga.net/projects/bbmap/) with the parameters qtrim2=t trimq=10, 15, 20 minq=12 mininsert=150. Read pairs that could not be merged were discarded. The merged reads were downsampled to 300,000 reads using reformat.sh in the bbmap package (samplereadstarget=300000). The merged and downsampled reads were assembled with Geneious 8 (set to Medium Sensitivity/Fast) (http://www.geneious.com/). Finally, contigs composed of more than 100 merged reads were retained for further analysis, with most of these composed of over 1000 reads. In this way, a total of 1457 contigs were generated (Table 6).

[0343] Approximately 220 contigs were obtained from each accession, except for Triticum timopheevii for which only 138 contigs were assembled. This is consistent with the tetraploid nature of the Triticum timopheevii genome. The consistency of the results indicates that the RFL-capture experiment was, a priori, comprehensive.

TABLE 6
Number of RFL contigs and ORFs identified per accession and number
of orthologous groups to which the ORFs were assigned with CD-hit.

| | Number of assembled | Number of | Number of orthologous | Number of RFL ORFs >350 |
|---|---|---|---|---|
| Accession | contigs composed | identified RFL | groups with at least one | aa assigned to |
| name | of >100 reads | ORFs >210 aa* | RFL from the accession | orthologous groups |
| Anapurna | 211 | 221 | 202 | 156 |
| Primepii | 226 | 234 | 215 | 162 |
| R197 | 219 | 241 | 219 | 174 |
| R0932E | 221 | 245 | 221 | 183 |
| R0934F | 223 | 237 | 215 | 174 |
| Triticum | 138 | 143 | 129 | 114 |
| timopheevi | | | | |
| Wheat-Rye-6R | 219 | 233 | 212 | 163 |
| TOTAL | 1457 | 1554 | 397 (non-redundant) | 1254 |

[0344] Sequences encoding RFL proteins were identified within these contigs as follows.

[0345] Open reading frames (ORFs) within the contigs were identified with getorf from the EMBOSS package (Rice et al. 2000) using the parameters -minsize 630 -find 0 -reverse true. Thus only ORFs longer than 210 amino acids were used for further analysis. In total, 1554 ORFs were identified across the seven accessions (Table 6). The number of ORFs per accession ranged from 143 ORFs in T. timopheevii to 245 in R0934F (Table 6). The ORFs were further analyzed using hmmsearch (with parameters -E 0.1 --domE 100) from the HMMER package (v3.1b1) to detect PPR motifs using the hidden Markov models developed by Cheng et al. (2016) and the post-processing steps described in the same paper. Finally, to identify putatively orthologous RFL sequences across all seven accessions, the 1554 RFL ORFs were clustered using CD-hit (settings -c 0.96 -n 5 -G 0 -d 0 -AS 60 -A 105 -g 1). Across all accessions, 397 non-redundant RFL clusters representing putatively orthologous groups were obtained (Table 6). We define an orthologous RFL group as a set of at least one RFL ORF from at least one accession and wherein, if at least two sequences are present, these sequences share at least 96% sequence identity over the alignment length. Some highly conserved RFL genes are present in all seven accessions, others are found in only a subset of the accessions, or in a single accession. In most cases, each orthologous RFL group contains only one RFL protein from each accession.

[0346] Table 7 below is showing the different RFL groups, the corresponding ORF names and the corresponding protein sequence number and DNA encoding protein sequence number.

[0347] However, we found that genes encoding RFL-PPR proteins are often inactivated by indels creating frameshifts that break the contiguity of the ORFs, resulting in two shorter ORFs corresponding to a single longer ORF in another accession. In these cases, both shorter ORFs could be within the same orthologous group. In our analysis, only ORF encoding more than 350 amino acids were considered as possibly functional. This threshold was used as it corresponds to 10 PPR motifs (each of 35 amino acids), and all known active Rf proteins contain at least this number of motifs (usually 15-20).

[0348] Finally, a set of 397 orthologous RFL groups were identified and numbered from 1 to 397 (see Table 7 below).

TABLE 7

| RFL-Name | Name | SEQID-PRT1 | SEQID-DNA |
|---|---|---|---|
| RFL 1 | R0932E.300k_Assembly_Contig_60_2 | 1 | 1555 |
| RFL 1 | R197.300k_Assembly_Contig_73_2 | 2 | 1556 |
| RFL 2 | R0934F.300k_Assembly_Contig_11_2 | 3 | 1557 |
| RFL 2 | Anapurna.300k_Assembly_Contig_47_1 | 4 | 1558 |
| RFL 2 | Primepii.300k_Assembly_Contig_16_2 | 5 | 1559 |
| RFL 2 | R0932E.300k_Assembly_Contig_39_1 | 6 | 1560 |
| RFL 2 | R197.300k_Assembly_Contig_31_1 | 7 | 1561 |
| RFL 2 | Wheat-Rye-6R.300k_Assembly_Contig_13_1 | 8 | 1562 |
| RFL 3 | R0934F.300k_Assembly_Contig_34_2 | 9 | 1563 |
| RFL 3 | R0932E.300k_Assembly_Contig_41_1 | 10 | 1564 |
| RFL 3 | Wheat-Rye-6R.300k_Assembly_Contig_44_1 | 11 | 1565 |
| RFL 3 | Primepii.300k_Assembly_Contig_27_2 | 12 | 1566 |
| RFL 3 | R197.300k_Assembly_Contig_34_1 | 13 | 1567 |
| RFL 3 | Anapurna.300k_Assembly_Contig_21_1 | 14 | 1568 |
| RFL 4 | R197.300k_Assembly_Contig_38_2 | 15 | 1569 |
| RFL 4 | Anapurna.300k_Assembly_Contig_48_2 | 16 | 1570 |
| RFL 4 | Primepii.300k_Assembly_Contig_39_2 | 17 | 1571 |
| RFL 4 | R0932E.300k_Assembly_Contig_47_1 | 18 | 1572 |
| RFL 4 | R0934F.300k_Assembly_Contig_44_1 | 19 | 1573 |
| RFL 4 | Wheat-Rye-6R.300k_Assembly_Contig_32_2 | 20 | 1574 |
| RFL 4 | Triticum- | 21 | 1575 |
| | timopheevii.300k_Assembly_Contig_19_2 | | |
| RFL 5 | Primepii.300k_Assembly_Contig_9_3 | 22 | 1576 |
| RFL 5 | R0934F.300k_Assembly_Contig_7_3 | 23 | 1577 |
| RFL 5 | Anapurna.300k_Assembly_Contig_15_3 | 24 | 1578 |
| RFL 5 | R197.300k_Assembly_Contig_12_3 | 25 | 1579 |
| RFL 5 | R0932E.300k_Assembly_Contig_11_2 | 26 | 1580 |
| RFL 5 | Wheat-Rye-6R.300k_Assembly_Contig_9_2 | 27 | 1581 |
| RFL 5 | Triticum- | 28 | 1582 |
| | timopheevii.300k_Assembly_Contig_9_2 | | |
| RFL 6 | Wheat-Rye-6R.300k_Assembly_Contig_99_1 | 29 | 1583 |
| RFL 6 | Primepii.300k_Assembly_Contig_109_1 | 30 | 1584 |
| RFL 6 | Anapurna.300k_Assembly_Contig_99_2 | 31 | 1585 |
| RFL 6 | Anapurna.300k_Assembly_Contig_99_1 | 32 | 1586 |
| RFL 7 | Anapurna.300k_Assembly_Contig_82_1 | 33 | 1587 |
| RFL 7 | Primepii.300k_Assembly_Contig_25_1 | 34 | 1588 |
| RFL 7 | R0934F.300k_Assembly_Contig_86_1 | 35 | 1589 |
| RFL 7 | R197.300k_Assembly_Contig_11_1 | 36 | 1590 |
| RFL 7 | R0932E.300k_Assembly_Contig_61_1 | 37 | 1591 |
| RFL 7 | Wheat-Rye-6R.300k_Assembly_Contig_34_1 | 38 | 1592 |
| RFL 8 | R0932E.300k_Assembly_Contig_85_1 | 39 | 1593 |
| RFL 8 | Wheat-Rye-6R.300k_Assembly_Contig_79_2 | 40 | 1594 |
| RFL 8 | R0934F.300k_Assembly_Contig_87_2 | 41 | 1595 |
| RFL 8 | Primepii.300k_Assembly_Contig_64_1 | 42 | 1596 |
| RFL 8 | R197.300k_Assembly_Contig_71_2 | 43 | 1597 |
| RFL 8 | Anapurna.300k_Assembly_Contig_54_2 | 44 | 1598 |
| RFL 9 | R0932E.300k_Assembly_Contig_66_1 | 45 | 1599 |
| RFL 9 | Wheat-Rye-6R.300k_Assembly_Contig_69_1 | 46 | 1600 |
| RFL 9 | Primepii.300k_Assembly_Contig_59_1 | 47 | 1601 |
| RFL 9 | R197.300k_Assembly_Contig_51_1 | 48 | 1602 |
| RFL 9 | R0934F.300k_Assembly_Contig_89_1 | 49 | 1603 |
| RFL 9 | Anapurna.300k_Assembly_Contig_66_1 | 50 | 1604 |
| RFL 10 | Primepii.300k_Assembly_Contig_62_2 | 51 | 1605 |
| RFL 10 | Anapurna.300k_Assembly_Contig_179_1 | 52 | 1606 |
| RFL 10 | Anapurna.300k_Assembly_Contig_70_1 | 53 | 1607 |
| RFL 10 | R0932E.300k_Assembly_Contig_34_2 | 54 | 1608 |
| RFL 10 | Primepii.300k_Assembly_Contig_191_1 | 55 | 1609 |
| RFL 10 | R197.300k_Assembly_Contig_189_1 | 56 | 1610 |
| RFL 10 | Triticum- | 57 | 1611 |
| | timopheevii.300k_Assembly_Contig_13_1 | | |
| RFL 10 | R197.300k_Assembly_Contig_64_1 | 58 | 1612 |
| RFL 10 | Wheat-Rye-6R.300k_Assembly_Contig_62_2 | 59 | 1613 |
| RFL 10 | Wheat-Rye-6R.300k_Assembly_Contig_190_1 | 60 | 1614 |
| RFL 10 | R0934F.300k_Assembly_Contig_29_1 | 61 | 1615 |
| RFL 11 | Anapurna.300k_Assembly_Contig_14_2 | 62 | 1616 |
| RFL 11 | R0934F.300k_Assembly_Contig_14_2 | 63 | 1617 |
| RFL 11 | R0934F.300k_Assembly_Contig_14_1 | 64 | 1618 |
| RFL 11 | Triticum- | 65 | 1619 |
| | timopheevii.300k_Assembly_Contig_22_1 | | |
| RFL 11 | Primepii.300k_Assembly_Contig_38_2 | 66 | 1620 |
| RFL 11 | Triticum- | 67 | 1621 |
| | timopheevii.300k_Assembly_Contig_22_2 | | |
| RFL 11 | R197.300k_Assembly_Contig_33_1 | 68 | 1622 |
| RFL 11 | R0932E.300k_Assembly_Contig_27_2 | 69 | 1623 |
| RFL 11 | R197.300k_Assembly_Contig_33_2 | 70 | 1624 |
| RFL 11 | R0932E.300k_Assembly_Contig_27_1 | 71 | 1625 |
| RFL 11 | Wheat-Rye-6R.300k_Assembly_Contig_12_2 | 72 | 1626 |
| RFL 12 | R197.300k_Assembly_Contig_119_1 | 73 | 1627 |
| RFL 12 | Wheat-Rye-6R.300k_Assembly_Contig_115_1 | 74 | 1628 |
| RFL 12 | R0932E.300k_Assembly_Contig_120_2 | 75 | 1629 |
| RFL 13 | Anapurna.300k_Assembly_Contig_8_3 | 76 | 1630 |
| RFL 13 | Primepii.300k_Assembly_Contig_8_2 | 77 | 1631 |
| RFL 13 | R0932E.300k_Assembly_Contig_8_2 | 78 | 1632 |
| RFL 13 | R197.300k_Assembly_Contig_25_2 | 79 | 1633 |
| RFL 13 | Wheat-Rye-6R.300k_Assembly_Contig_21_2 | 80 | 1634 |
| RFL 13 | R0934F.300k_Assembly_Contig_18_2 | 81 | 1635 |
| RFL 14 | R0932E.300k_Assembly_Contig_24_1 | 82 | 1636 |
| RFL 14 | R0934F.300k_Assembly_Contig_10_1 | 83 | 1637 |
| RFL 14 | Wheat-Rye-6R.300k_Assembly_Contig_26_1 | 84 | 1638 |
| RFL 14 | R197.300k_Assembly_Contig_23_1 | 85 | 1639 |
| RFL 14 | Primepii.300k_Assembly_Contig_11_1 | 86 | 1640 |
| RFL 14 | Anapurna.300k_Assembly_Contig_13_1 | 87 | 1641 |
| RFL 15 | R197.300k_Assembly_Contig_29_1 | 88 | 1642 |
| RFL 15 | Anapurna.300k_Assembly_Contig_28_1 | 89 | 1643 |
| RFL 15 | R0934F.300k_Assembly_Contig_20_1 | 90 | 1644 |
| RFL 15 | Triticum- | 91 | 1645 |
| | timopheevii.300k_Assembly_Contig_11_2 | | |
| RFL 15 | R0932E.300k_Assembly_Contig_38_1 | 92 | 1646 |
| RFL 15 | Wheat-Rye-6R.300k_Assembly_Contig_6_1 | 93 | 1647 |
| RFL 15 | Primepii.300k_Assembly_Contig_22_1 | 94 | 1648 |
| RFL 16 | Primepii.300k_Assembly_Contig_23_2 | 95 | 1649 |
| RFL 16 | R197.300k_Assembly_Contig_43_2 | 96 | 1650 |
| RFL 16 | Wheat-Rye-6R.300k_Assembly_Contig_11_2 | 97 | 1651 |
| RFL 16 | Anapurna.300k_Assembly_Contig_10_2 | 98 | 1652 |
| RFL 16 | R0932E.300k_Assembly_Contig_18_2 | 99 | 1653 |
| RFL 16 | R0934F.300k_Assembly_Contig_15_2 | 100 | 1654 |
| RFL 17 | Triticum- | 101 | 1655 |
| | timopheevii.300k_Assembly_Contig_7_1 | | |
| RFL 17 | R197.300k_Assembly_Contig_58_1 | 102 | 1656 |
| RFL 17 | Wheat-Rye-6R.300k_Assembly_Contig_59_1 | 103 | 1657 |
| RFL 17 | R0934F.300k_Assembly_Contig_51_1 | 104 | 1658 |
| RFL 17 | Triticum- | 105 | 1659 |
| | timopheevii.300k_Assembly_Contig_29_2 | | |
| RFL 18 | R0934F.300k_Assembly_Contig_25_2 | 106 | 1660 |
| RFL 18 | R0932E.300k_Assembly_Contig_21_2 | 107 | 1661 |
| RFL 18 | R197.300k_Assembly_Contig_14_2 | 108 | 1662 |
| RFL 18 | Anapurna.300k_Assembly_Contig_6_2 | 109 | 1663 |
| RFL 18 | Triticum- | 110 | 1664 |
| | timopheevii.300k_Assembly_Contig_16_3 | | |
| RFL 18 | Primepii.300k_Assembly_Contig_20_2 | 111 | 1665 |
| RFL 18 | Wheat-Rye-6R.300k_Assembly_Contig_8_2 | 112 | 1666 |
| RFL 19 | Anapurna.300k_Assembly_Contig_68_1 | 113 | 1667 |
| RFL 20 | Triticum- | 114 | 1668 |
| | timopheevii.300k_Assembly_Contig_47_1 | | |
| RFL 21 | R197.300k_Assembly_Contig_18_1 | 115 | 1669 |
| RFL 21 | Anapurna.300k_Assembly_Contig_16_1 | 116 | 1670 |
| RFL 21 | R0932E.300k_Assembly_Contig_58_1 | 117 | 1671 |
| RFL 21 | Wheat-Rye-6R.300k_Assembly_Contig_23_3 | 118 | 1672 |
| RFL 21 | Wheat-Rye-6R.300k_Assembly_Contig_23_2 | 119 | 1673 |
| RFL 21 | Primepii.300k_Assembly_Contig_42_2 | 120 | 1674 |
| RFL 21 | R0934F.300k_Assembly_Contig_28_3 | 121 | 1675 |
| RFL 21 | Primepii.300k_Assembly_Contig_42_3 | 122 | 1676 |
| RFL 21 | R0934F.300k_Assembly_Contig_28_2 | 123 | 1677 |
| RFL 22 | Primepii.300k_Assembly_Contig_63_1 | 124 | 1678 |
| RFL 22 | R0934F.300k_Assembly_Contig_61_1 | 125 | 1679 |
| RFL 23 | R0934F.300k_Assembly_Contig_46_2 | 126 | 1680 |
| RFL 23 | Wheat-Rye-6R.300k_Assembly_Contig_30_1 | 127 | 1681 |
| RFL 23 | R197.300k_Assembly_Contig_15_3 | 128 | 1682 |
| RFL 23 | R0932E.300k_Assembly_Contig_40_1 | 129 | 1683 |
| RFL 23 | R0934F.300k_Assembly_Contig_46_1 | 130 | 1684 |
| RFL 23 | R197.300k_Assembly_Contig_15_2 | 131 | 1685 |
| RFL 23 | Anapurna.300k_Assembly_Contig_42_1 | 132 | 1686 |
| RFL 23 | Primepii.300k_Assembly_Contig_14_2 | 133 | 1687 |
| RFL 24 | Anapurna.300k_Assembly_Contig_17_1 | 134 | 1688 |
| RFL 24 | R0934F.300k_Assembly_Contig_22_1 | 135 | 1689 |
| RFL 24 | R0932E.300k_Assembly_Contig_44_1 | 136 | 1690 |
| RFL 24 | Primepii.300k_Assembly_Contig_46_1 | 137 | 1691 |
| RFL 24 | R197.300k_Assembly_Contig_30_1 | 138 | 1692 |
| RFL 24 | Wheat-Rye-6R.300k_Assembly_Contig_40_1 | 139 | 1693 |
| RFL 25 | R197.300k_Assembly_Contig_92_2 | 140 | 1694 |
| RFL 25 | Wheat-Rye-6R.300k_Assembly_Contig_109_2 | 141 | 1695 |
| RFL 26 | Anapurna.300k_Assembly_Contig_38_1 | 142 | 1696 |
| RFL 26 | Wheat-Rye-6R.300k_Assembly_Contig_41_1 | 143 | 1697 |
| RFL 27 | Triticum- | 144 | 1698 |
| | timopheevii.300k_Assembly_Contig_63_3 | | |
| RFL 28 | R0932E.300k_Assembly_Contig_23_2 | 145 | 1699 |
| RFL 28 | R0932E.300k_Assembly_Contig_23_3 | 146 | 1700 |
| RFL 28 | Primepii.300k_Assembly_Contig_13_1 | 147 | 1701 |
| RFL 28 | R197.300k_Assembly_Contig_10_3 | 148 | 1702 |
| RFL 28 | R197.300k_Assembly_Contig_10_2 | 149 | 1703 |
| RFL 28 | R0934F.300k_Assembly_Contig_17_1 | 150 | 1704 |
| RFL 28 | Anapurna.300k_Assembly_Contig_2_3 | 151 | 1705 |
| RFL 28 | Wheat-Rye-6R.300k_Assembly_Contig_7_3 | 152 | 1706 |
| RFL 28 | Anapurna.300k_Assembly_Contig_2_2 | 153 | 1707 |
| RFL 28 | Wheat-Rye-6R.300k_Assembly_Contig_7_2 | 154 | 1708 |
| RFL 29 | Wheat-Rye-6R.300k_Assembly_Contig_77_2 | 155 | 1709 |
| RFL 29 | R0934F.300k_Assembly_Contig_78_1 | 156 | 1710 |
| RFL 29 | Wheat-Rye-6R.300k_Assembly_Contig_77_1 | 157 | 1711 |
| RFL 29 | Primepii.300k_Assembly_Contig_67_1 | 158 | 1712 |
| RFL 30 | Primepii.300k_Assembly_Contig_91_1 | 159 | 1713 |
| RFL 30 | R0934F.300k_Assembly_Contig_64_1 | 160 | 1714 |
| RFL 30 | R0932E.300k_Assembly_Contig_110_1 | 161 | 1715 |
| RFL 31 | Triticum- | 162 | 1716 |
| | timopheevii.300k_Assembly_Contig_14_1 | | |
| RFL 32 | Triticum- | 163 | 1717 |
| | timopheevii.300k_Assembly_Contig_6_2 | | |
| RFL 32 | Primepii.300k_Assembly_Contig_6_2 | 164 | 1718 |
| RFL 32 | R0934F.300k_Assembly_Contig_31_2 | 165 | 1719 |
| RFL 32 | R197.300k_Assembly_Contig_7_2 | 166 | 1720 |
| RFL 32 | Anapurna.300k_Assembly_Contig_31_2 | 167 | 1721 |
| RFL 32 | Wheat-Rye-6R.300k_Assembly_Contig_5_2 | 168 | 1722 |
| RFL 32 | R0932E.300k_Assembly_Contig_29_2 | 169 | 1723 |
| RFL 33 | Triticum- | 170 | 1724 |
| | timopheevii.300k_Assembly_Contig_8_1 | | |
| RFL 33 | Anapurna.300k_Assembly_Contig_5_2 | 171 | 1725 |
| RFL 33 | R197.300k_Assembly_Contig_6_3 | 172 | 1726 |
| RFL 33 | Wheat-Rye-6R.300k_Assembly_Contig_25_1 | 173 | 1727 |
| RFL 33 | R0932E.300k_Assembly_Contig_19_1 | 174 | 1728 |
| RFL 33 | Primepii.300k_Assembly_Contig_21_2 | 175 | 1729 |
| RFL 33 | R0934F.300k_Assembly_Contig_104_1 | 176 | 1730 |
| RFL 34 | R0932E.300k_Assembly_Contig_5_1 | 177 | 1731 |
| RFL 34 | R0932E.300k_Assembly_Contig_2_4 | 178 | 1732 |
| RFL 35 | Triticum- | 179 | 1733 |
| | timopheevii.300k_Assembly_Contig_21_2 | | |
| RFL 36 | Triticum- | 180 | 1734 |
| | timopheevii.300k_Assembly_Contig_20_2 | | |
| RFL 37 | Anapurna.300k_Assembly_Contig_37_2 | 181 | 1735 |
| RFL 37 | Wheat-Rye-6R.300k_Assembly_Contig_19_2 | 182 | 1736 |
| RFL 37 | R0932E.300k_Assembly_Contig_12_2 | 183 | 1737 |
| RFL 37 | R197.300k_Assembly_Contig_20_2 | 184 | 1738 |
| RFL 37 | R0934F.300k_Assembly_Contig_37_2 | 185 | 1739 |
| RFL 37 | Primepii.300k_Assembly_Contig_10_2 | 186 | 1740 |
| RFL 38 | Triticum- | 187 | 1741 |
| | timopheevii.300k_Assembly_Contig_43_2 | | |
| RFL 39 | R0932E.300k_Assembly_Contig_53_2 | 188 | 1742 |
| RFL 39 | Anapurna.300k_Assembly_Contig_29_2 | 189 | 1743 |
| RFL 39 | R0932E.300k_Assembly_Contig_22_1 | 190 | 1744 |
| RFL 39 | Wheat-Rye-6R.300k_Assembly_Contig_28_2 | 191 | 1745 |
| RFL 39 | Triticum- | 192 | 1746 |
| | timopheevii.300k_Assembly_Contig_25_2 | | |
| RFL 39 | Wheat-Rye-6R.300k_Assembly_Contig_15_1 | 193 | 1747 |
| RFL 39 | R0934F.300k_Assembly_Contig_27_1 | 194 | 1748 |
| RFL 39 | R0934F.300k_Assembly_Contig_26_2 | 195 | 1749 |
| RFL 39 | Primepii.300k_Assembly_Contig_40_2 | 196 | 1750 |
| RFL 39 | Primepii.300k_Assembly_Contig_30_1 | 197 | 1751 |
| RFL 39 | R197.300k_Assembly_Contig_36_2 | 198 | 1752 |
| RFL 39 | R197.300k_Assembly_Contig_27_1 | 199 | 1753 |
| RFL 39 | Anapurna.300k_Assembly_Contig_43_1 | 200 | 1754 |
| RFL 40 | R0934F.300k_Assembly_Contig_12_1 | 201 | 1755 |
| RFL 40 | Primepii.300k_Assembly_Contig_18_1 | 202 | 1756 |
| RFL 40 | Triticum- | 203 | 1757 |
| | timopheevii.300k_Assembly_Contig_5_1 | | |
| RFL 40 | R0932E.300k_Assembly_Contig_7_1 | 204 | 1758 |
| RFL 40 | Anapurna.300k_Assembly_Contig_20_1 | 205 | 1759 |
| RFL 40 | R197.300k_Assembly_Contig_32_1 | 206 | 1760 |
| RFL 41 | R0934F.300k_Assembly_Contig_24_2 | 207 | 1761 |
| RFL 41 | Wheat-Rye-6R.300k_Assembly_Contig_45_2 | 208 | 1762 |
| RFL 41 | Anapurna.300k_Assembly_Contig_39_2 | 209 | 1763 |
| RFL 41 | R0932E.300k_Assembly_Contig_56_2 | 210 | 1764 |
| RFL 41 | Primepii.300k_Assembly_Contig_47_2 | 211 | 1765 |
| RFL 41 | R197.300k_Assembly_Contig_40_2 | 212 | 1766 |
| RFL 42 | Triticum- | 213 | 1767 |
| | timopheevii.300k_Assembly_Contig_10_3 | | |
| RFL 43 | R0934F.300k_Assembly_Contig_8_1 | 214 | 1768 |
| RFL 43 | R0932E.300k_Assembly_Contig_13_1 | 215 | 1769 |
| RFL 43 | Triticum- | 216 | 1770 |
| | timopheevii.300k_Assembly_Contig_12_2 | | |
| RFL 43 | R197.300k_Assembly_Contig_22_1 | 217 | 1771 |
| RFL 43 | Primepii.300k_Assembly_Contig_31_1 | 218 | 1772 |
| RFL 43 | Anapurna.300k_Assembly_Contig_23_1 | 219 | 1773 |
| RFL 43 | Wheat-Rye-6R.300k_Assembly_Contig_10_1 | 220 | 1774 |
| RFL 44 | R0932E.300k_Assembly_Contig_32_1 | 221 | 1775 |
| RFL 44 | Primepii.300k_Assembly_Contig_7_1 | 222 | 1776 |
| RFL 44 | Anapurna.300k_Assembly_Contig_33_1 | 223 | 1777 |
| RFL 45 | R0932E.300k_Assembly_Contig_73_2 | 224 | 1778 |
| RFL 45 | R197.300k_Assembly_Contig_70_{——}2 | 225 | 1779 |
| RFL 45 | Wheat-Rye-6R.300k_Assembly_Contig_72_2 | 226 | 1780 |
| RFL 46 | Wheat-Rye-6R.300k_Assembly_Contig_35_1 | 227 | 1781 |
| RFL 47 | R0934F.300k_Assembly_Contig_57_2 | 228 | 1782 |
| RFL 47 | Wheat-Rye-6R.300k_Assembly_Contig_67_2 | 229 | 1783 |
| RFL 47 | Anapurna.300k_Assembly_Contig_85_2 | 230 | 1784 |
| RFL 47 | R0932E.300k_Assembly_Contig_71_2 | 231 | 1785 |
| RFL 47 | R197.300k_Assembly_Contig_62_2 | 232 | 1786 |
| RFL 47 | Primepii.300k_Assembly_Contig_86_3 | 233 | 1787 |
| RFL 48 | Primepii.300k_Assembly_Contig_51_1 | 234 | 1788 |
| RFL 48 | R197.300k_Assembly_Contig_57_1 | 235 | 1789 |
| RFL 48 | Anapurna.300k_Assembly_Contig_74_1 | 236 | 1790 |
| RFL 48 | R0934F.300k_Assembly_Contig_71_1 | 237 | 1791 |
| RFL 48 | R0932E.300k_Assembly_Contig_72_1 | 238 | 1792 |
| RFL 48 | Wheat-Rye-6R.300k_Assembly_Contig_82_1 | 239 | 1793 |
| RFL 49 | R197.300k_Assembly_Contig_83_1 | 240 | 1794 |
| RFL 49 | R197.300k_Assembly_Contig_95_2 | 241 | 1795 |
| RFL 49 | Triticum- | 242 | 1796 |
| | timopheevii.300k_Assembly_Contig_37_1 | | |
| RFL 49 | Triticum- | 243 | 1797 |
| | timopheevii.300k_Assembly_Contig_38_1 | | |
| RFL 50 | Anapurna.300k_Assembly_Contig_24_2 | 244 | 1798 |
| RFL 50 | Primepii.300k_Assembly_Contig_24_2 | 245 | 1799 |
| RFL 50 | R0932E.300k_Assembly_Contig_25_2 | 246 | 1800 |
| RFL 50 | R197.300k_Assembly_Contig_21_2 | 247 | 1801 |
| RFL 50 | Wheat-Rye-6R.300k_Assembly_Contig_22_2 | 248 | 1802 |
| RFL 50 | R0934F.300k_Assembly_Contig_39_2 | 249 | 1803 |
| RFL 51 | Anapurna.300k_Assembly_Contig_35_2 | 250 | 1804 |
| RFL 51 | R0934F.300k_Assembly_Contig_5_4 | 251 | 1805 |
| RFL 51 | Primepii.300k_Assembly_Contig_17_3 | 252 | 1806 |
| RFL 51 | Anapurna.300k_Assembly_Contig_109_1 | 253 | 1807 |
| RFL 51 | Primepii.300k_Assembly_Contig_19_2 | 254 | 1808 |
| RFL 51 | R0932E.300k_Assembly_Contig_55_1 | 255 | 1809 |
| RFL 51 | Wheat-Rye-6R.300k_Assembly_Contig_2_1 | 256 | 1810 |
| RFL 51 | R0934F.300k_Assembly_Contig_55_2 | 257 | 1811 |
| RFL 51 | Triticum- | 258 | 1812 |
| | timopheevii.300k_Assembly_Contig_4_2 | | |
| RFL 51 | R197.300k_Assembly_Contig_46_2 | 259 | 1813 |
| RFL 51 | Wheat-Rye-6R.300k_Assembly_Contig_37_2 | 260 | 1814 |
| RFL 51 | Anapurna.300k_Assembly_Contig_106_1 | 261 | 1815 |
| RFL 51 | R197.300k_Assembly_Contig_5_3 | 262 | 1816 |
| RFL 51 | R0932E.300k_Assembly_Contig_6_2 | 263 | 1817 |
| RFL 52 | R197.300k_Assembly_Contig_37_1 | 264 | 1818 |
| RFL 52 | R197.300k_Assembly_Contig_37_2 | 265 | 1819 |
| RFL 52 | R0932E.300k_Assembly_Contig_45_1 | 266 | 1820 |
| RFL 52 | Wheat-Rye-6R.300k_Assembly_Contig_39_1 | 267 | 1821 |
| RFL 52 | Wheat-Rye-6R.300k_Assembly_Contig_39_2 | 268 | 1822 |
| RFL 52 | Primepii.300k_Assembly_Contig_49_1 | 269 | 1823 |
| RFL 52 | Anapurna.300k_Assembly_Contig_22_1 | 270 | 1824 |
| RFL 52 | R0934F.300k_Assembly_Contig_49_1 | 271 | 1825 |
| RFL 52 | R0934F.300k_Assembly_Contig_49_2 | 272 | 1826 |
| RFL 52 | Triticum- | 273 | 1827 |
| | timopheevii.300k_Assembly_Contig_29_1 | | |
| RFL 53 | R0934F.300k_Assembly_Contig_75_2 | 274 | 1828 |
| RFL 53 | R0932E.300k_Assembly_Contig_64_2 | 275 | 1829 |
| RFL 53 | Anapurna.300k_Assembly_Contig_72_2 | 276 | 1830 |
| RFL 53 | Primepii.300k_Assembly_Contig_57_2 | 277 | 1831 |
| RFL 53 | Triticum- | 278 | 1832 |
| | timopheevii.300k_Assembly_Contig_55_3 | | |
| RFL 54 | Wheat-Rye-6R.300k_Assembly_Contig_80_1 | 279 | 1833 |
| RFL 54 | R0932E.300k_Assembly_Contig_209_1 | 280 | 1834 |
| RFL 54 | Anapurna.300k_Assembly_Contig_77_1 | 281 | 1835 |
| RFL 55 | R0932E.300k_Assembly_Contig_54_1 | 282 | 1836 |
| RFL 55 | R197.300k_Assembly_Contig_39_1 | 283 | 1837 |
| RFL 55 | R0934F.300k_Assembly_Contig_54_1 | 284 | 1838 |
| RFL 55 | Anapurna.300k_Assembly_Contig_41_1 | 285 | 1839 |
| RFL 55 | Primepii.300k_Assembly_Contig_44_1 | 286 | 1840 |
| RFL 55 | Wheat-Rye-6R.300k_Assembly_Contig_31_1 | 287 | 1841 |
| RFL 56 | R197.300k_Assembly_Contig_86_1 | 288 | 1842 |
| RFL 56 | R0932E.300k_Assembly_Contig_74_1 | 289 | 1843 |
| RFL 56 | Triticum- | 290 | 1844 |
| | timopheevii.300k_Assembly_Contig_39_1 | | |
| RFL 58 | Wheat-Rye-6R.300k_Assembly_Contig_66_1 | 291 | 1845 |
| RFL 58 | Anapurna.300k_Assembly_Contig_12_1 | 292 | 1846 |
| RFL 59 | Triticum- | 293 | 1847 |
| | timopheevii.300k_Assembly_Contig_60_1 | | |
| RFL 59 | R197.300k_Assembly_Contig_115_1 | 294 | 1848 |
| RFL 59 | R0932E.300k_Assembly_Contig_161_1 | 295 | 1849 |
| RFL 59 | R0932E.300k_Assembly_Contig_48_1 | 296 | 1850 |
| RFL 60 | Primepii.300k_Assembly_Contig_94_1 | 297 | 1851 |
| RFL 60 | R197.300k_Assembly_Contig_95_1 | 298 | 1852 |
| RFL 60 | R0934F.300k_Assembly_Contig_73_2 | 299 | 1853 |
| RFL 60 | Wheat-Rye-6R.300k_Assembly_Contig_48_2 | 300 | 1854 |
| RFL 61 | Triticum- | 301 | 1855 |
| | timopheevii.300k_Assembly_Contig_48_1 | | |
| RFL 62 | R0934F.300k_Assembly_Contig_138_1 | 302 | 1856 |
| RFL 63 | R197.300k_Assembly_Contig_84_1 | 303 | 1857 |
| RFL 63 | R197.300k_Assembly_Contig_84_2 | 304 | 1858 |
| RFL 63 | Triticum- | 305 | 1859 |
| | timopheevii.300k_Assembly_Contig_34_1 | | |
| RFL 64 | Primepii.300k_Assembly_Contig_50_1 | 306 | 1860 |
| RFL 64 | Wheat-Rye-6R.300k_Assembly_Contig_54_1 | 307 | 1861 |
| RFL 64 | R0934F.300k_Assembly_Contig_45_1 | 308 | 1862 |
| RFL 64 | Anapurna.300k_Assembly_Contig_61_1 | 309 | 1863 |
| RFL 64 | R197.300k_Assembly_Contig_42_1 | 310 | 1864 |
| RFL 64 | R0932E.300k_Assembly_Contig_59_1 | 311 | 1865 |
| RFL 65 | Triticum- | 312 | 1866 |
| | timopheevii.300k_Assembly_Contig_42_2 | | |
| RFL 66 | Triticum- | 313 | 1867 |
| | timopheevii.300k_Assembly_Contig_27_1 | | |
| RFL 66 | Triticum- | 314 | 1868 |
| | timopheevii.300k_Assembly_Contig_80_1 | | |
| RFL 67 | Primepii.300k_Assembly_Contig_213_1 | 315 | 1869 |
| RFL 67 | Primepii.300k_Assembly_Contig_80_2 | 316 | 1870 |
| RFL 67 | Primepii.300k_Assembly_Contig_80_1 | 317 | 1871 |
| RFL 67 | R0934F.300k_Assembly_Contig_111_2 | 318 | 1872 |
| RFL 67 | Primepii.300k_Assembly_Contig_2_1 | 319 | 1873 |
| RFL 67 | R0934F.300k_Assembly_Contig_111_1 | 320 | 1874 |
| RFL 67 | R0934F.300k_Assembly_Contig_4_1 | 321 | 1875 |
| RFL 68 | Wheat-Rye-6R.300k_Assembly_Contig_53_1 | 322 | 1876 |
| RFL 68 | R0932E.300k_Assembly_Contig_68_1 | 323 | 1877 |
| RFL 68 | Wheat-Rye-6R.300k_Assembly_Contig_53_3 | 324 | 1878 |
| RFL 68 | R197.300k_Assembly_Contig_19_1 | 325 | 1879 |
| RFL 68 | R0934F.300k_Assembly_Contig_66_1 | 326 | 1880 |
| RFL 68 | Triticum- | 327 | 1881 |
| | timopheevii.300k_Assembly_Contig_33_1 | | |
| RFL 68 | Anapurna.300k_Assembly_Contig_71_1 | 328 | 1882 |
| RFL 68 | Anapurna.300k_Assembly_Contig_71_2 | 329 | 1883 |
| RFL 68 | Primepii.300k_Assembly_Contig_37_1 | 330 | 1884 |
| RFL 68 | R0932E.300k_Assembly_Contig_68_3 | 331 | 1885 |
| RFL 68 | R197.300k_Assembly_Contig_19_3 | 332 | 1886 |
| RFL 69 | Triticum- | 333 | 1887 |
| | timopheevii.300k_Assembly_Contig_45_1 | | |
| RFL 70 | R0934F.300k_Assembly_Contig_68_1 | 334 | 1888 |
| RFL 70 | R197.300k_Assembly_Contig_65_1 | 335 | 1889 |
| RFL 70 | R0932E.300k_Assembly_Contig_94_1 | 336 | 1890 |
| RFL 70 | Primepii.300k_Assembly_Contig_55_1 | 337 | 1891 |
| RFL 70 | Anapurna.300k_Assembly_Contig_111_1 | 338 | 1892 |
| RFL 70 | Wheat-Rye-6R.300k_Assembly_Contig_74_1 | 339 | 1893 |
| RFL 70 | Anapurna.300k_Assembly_Contig_98_1 | 340 | 1894 |
| RFL 71 | R0932E.300k_Assembly_Contig_114_1 | 341 | 1895 |
| RFL 72 | R0932E.300k_Assembly_Contig_98_1 | 342 | 1896 |
| RFL 73 | R0932E.300k_Assembly_Contig_89_2 | 343 | 1897 |
| RFL 73 | R197.300k_Assembly_Contig_78_2 | 344 | 1898 |
| RFL 73 | Triticum- | 345 | 1899 |
| | timopheevii.300k_Assembly_Contig_31_2 | | |
| RFL 74 | R197.300k_Assembly_Contig_194_1 | 346 | 1900 |
| RFL 74 | R0934F.300k_Assembly_Contig_36_2 | 347 | 1901 |
| RFL 74 | R0934F.300k_Assembly_Contig_150_2 | 348 | 1902 |
| RFL 74 | R0932E.300k_Assembly_Contig_185_1 | 349 | 1903 |
| RFL 74 | R0932E.300k_Assembly_Contig_201_1 | 350 | 1904 |
| RFL 74 | R0932E.300k_Assembly_Contig_92_1 | 351 | 1905 |
| RFL 74 | R197.300k_Assembly_Contig_179_1 | 352 | 1906 |
| RFL 74 | R0932E.300k_Assembly_Contig_83_1 | 353 | 1907 |
| RFL 74 | R197.300k_Assembly_Contig_4_1 | 354 | 1908 |
| RFL 74 | R0934F.300k_Assembly_Contig_126_1 | 355 | 1909 |
| RFL 75 | R0932E.300k_Assembly_Contig_88_1 | 356 | 1910 |
| RFL 77 | R0932E.300k_Assembly_Contig_214_2 | 357 | 1911 |
| RFL 78 | R0932E.300k_Assembly_Contig_112_1 | 358 | 1912 |
| RFL 79 | R0932E.300k_Assembly_Contig_103_1 | 359 | 1913 |
| RFL 79 | R0934F.300k_Assembly_Contig_80_1 | 360 | 1914 |
| RFL 79 | R197.300k_Assembly_Contig_120_1 | 361 | 1915 |
| RFL 79 | Triticum- | 362 | 1916 |
| | timopheevii.300k_Assembly_Contig_57_1 | | |
| RFL 80 | R197.300k_Assembly_Contig_59_1 | 363 | 1917 |
| RFL 81 | R0932E.300k_Assembly_Contig_4_1 | 364 | 1918 |
| RFL 81 | R0932E.300k_Assembly_Contig_199_1 | 365 | 1919 |
| RFL 82 | Triticum- | 366 | 1920 |
| | timopheevii.300k_Assembly_Contig_64_2 | | |
| RFL 82 | R0932E.300k_Assembly_Contig_123_2 | 367 | 1921 |
| RFL 83 | Primepii.300k_Assembly_Contig_52_1 | 368 | 1922 |
| RFL 83 | R0934F.300k_Assembly_Contig_43_1 | 369 | 1923 |
| RFL 83 | R0932E.300k_Assembly_Contig_46_1 | 370 | 1924 |
| RFL 83 | Anapurna.300k_Assembly_Contig_62_1 | 371 | 1925 |
| RFL 83 | R197.300k_Assembly_Contig_54_1 | 372 | 1926 |
| RFL 83 | Wheat-Rye-6R.300k_Assembly_Contig_60_1 | 373 | 1927 |
| RFL 84 | R0932E.300k_Assembly_Contig_116_1 | 374 | 1928 |
| RFL 85 | R197.300k_Assembly_Contig_80_3 | 375 | 1929 |
| RFL 85 | Triticum- | 376 | 1930 |
| | timopheevii.300k_Assembly_Contig_36_3 | | |
| RFL 85 | R197.300k_Assembly_Contig_80_2 | 377 | 1931 |
| RFL 87 | Wheat-Rye-6R.300k_Assembly_Contig_73_1 | 378 | 1932 |
| RFL 89 | Primepii.300k_Assembly_Contig_83_1 | 379 | 1933 |
| RFL 89 | Primepii.300k_Assembly_Contig_183_1 | 380 | 1934 |
| RFL 89 | R0934F.300k_Assembly_Contig_99_1 | 381 | 1935 |
| RFL 90 | Primepii.300k_Assembly_Contig_82_2 | 382 | 1936 |
| RFL 90 | Wheat-Rye-6R.300k_Assembly_Contig_65_2 | 383 | 1937 |
| RFL 90 | R0934F.300k_Assembly_Contig_63_1 | 384 | 1938 |
| RFL 90 | R197.300k_Assembly_Contig_66_2 | 385 | 1939 |
| RFL 90 | Anapurna.300k_Assembly_Contig_51_1 | 386 | 1940 |
| RFL 90 | R0932E.300k_Assembly_Contig_90_1 | 387 | 1941 |
| RFL 92 | Wheat-Rye-6R.300k_Assembly_Contig_55_2 | 388 | 1942 |
| RFL 92 | R197.300k_Assembly_Contig_47_2 | 389 | 1943 |
| RFL 92 | Triticum- | 390 | 1944 |
| | timopheevii.300k_Assembly_Contig_30_2 | | |
| RFL 92 | R0932E.300k_Assembly_Contig_43_2 | 391 | 1945 |
| RFL 92 | Triticum- | 392 | 1946 |
| | timopheevii.300k_Assembly_Contig_30_3 | | |
| RFL 92 | Anapurna.300k_Assembly_Contig_50_2 | 393 | 1947 |
| RFL 92 | R0934F.300k_Assembly_Contig_48_2 | 394 | 1948 |
| RFL 92 | Primepii.300k_Assembly_Contig_53_2 | 395 | 1949 |
| RFL 93 | R197.300k_Assembly_Contig_117_1 | 396 | 1950 |
| RFL 93 | R0932E.300k_Assembly_Contig_113_1 | 397 | 1951 |
| RFL 94 | Wheat-Rye-6R.300k_Assembly_Contig_41_2 | 398 | 1952 |
| RFL 94 | Anapurna.300k_Assembly_Contig_38_2 | 399 | 1953 |
| RFL 94 | R197.300k_Assembly_Contig_24_1 | 400 | 1954 |
| RFL 94 | R0934F.300k_Assembly_Contig_32_1 | 401 | 1955 |
| RFL 94 | R0932E.300k_Assembly_Contig_17_1 | 402 | 1956 |
| RFL 94 | Primepii.300k_Assembly_Contig_41_2 | 403 | 1957 |
| RFL 95 | Triticum- | 404 | 1958 |
| | timopheevii.300k_Assembly_Contig_51_1 | | |
| RFL 96 | Primepii.300k_Assembly_Contig_72_1 | 405 | 1959 |
| RFL 97 | Anapurna.300k_Assembly_Contig_92_2 | 406 | 1960 |
| RFL 97 | Anapurna.300k_Assembly_Contig_19_1 | 407 | 1961 |
| RFL 97 | Wheat-Rye-6R.300k_Assembly_Contig_103_2 | 408 | 1962 |
| RFL 97 | Wheat-Rye-6R.300k_Assembly_Contig_63_1 | 409 | 1963 |
| RFL 98 | R0932E.300k_Assembly_Contig_79_1 | 410 | 1964 |
| RFL 98 | Primepii.300k_Assembly_Contig_70_1 | 411 | 1965 |
| RFL 98 | R0934F.300k_Assembly_Contig_70_1 | 412 | 1966 |
| RFL 98 | R197.300k_Assembly_Contig_63_1 | 413 | 1967 |
| RFL 98 | Wheat-Rye-6R.300k_Assembly_Contig_71_1 | 414 | 1968 |
| RFL 99 | R0932E.300k_Assembly_Contig_15_2 | 415 | 1969 |
| RFL 99 | R0932E.300k_Assembly_Contig_153_2 | 416 | 1970 |
| RFL 100 | R197.300k_Assembly_Contig_94_1 | 417 | 1971 |
| RFL 100 | Wheat-Rye-6R.300k_Assembly_Contig_113_1 | 418 | 1972 |
| RFL 100 | R0932E.300k_Assembly_Contig_100_1 | 419 | 1973 |
| RFL 100 | Anapurna.300k_Assembly_Contig_113_1 | 420 | 1974 |
| RFL 101 | Anapurna.300k_Assembly_Contig_59_1 | 421 | 1975 |
| RFL 101 | Triticum- | 422 | 1976 |
| | timopheevii.300k_Assembly_Contig_54_1 | | |
| RFL 102 | Triticum- | 423 | 1977 |
| | timopheevii.300k_Assembly_Contig_71_1 | | |
| RFL 103 | Primepii.300k_Assembly_Contig_106_1 | 424 | 1978 |
| RFL 103 | Wheat-Rye-6R.300k_Assembly_Contig_98_1 | 425 | 1979 |
| RFL 103 | R197.300k_Assembly_Contig_79_1 | 426 | 1980 |
| RFL 104 | R0934F.300k_Assembly_Contig_69_1 | 427 | 1981 |
| RFL 104 | Triticum- | 428 | 1982 |
| | timopheevii.300k_Assembly_Contig_35_1 | | |
| RFL 104 | R0932E.300k_Assembly_Contig_82_1 | 429 | 1983 |
| RFL 104 | R197.300k_Assembly_Contig_72_1 | 430 | 1984 |
| RFL 105 | Primepii.300k_Assembly_Contig_85_1 | 431 | 1985 |
| RFL 106 | Wheat-Rye-6R.300k_Assembly_Contig_87_2 | 432 | 1986 |
| RFL 106 | Primepii.300k_Assembly_Contig_81_2 | 433 | 1987 |
| RFL 106 | Anapurna.300k_Assembly_Contig_80_1 | 434 | 1988 |
| RFL 106 | R0932E.300k_Assembly_Contig_76_1 | 435 | 1989 |
| RFL 106 | R197.300k_Assembly_Contig_67_1 | 436 | 1990 |
| RFL 106 | R0934F.300k_Assembly_Contig_103_2 | 437 | 1991 |
| RFL 107 | R0934F.300k_Assembly_Contig_117_1 | 438 | 1992 |
| RFL 107 | Triticum- | 439 | 1993 |
| | timopheevii.300k_Assembly_Contig_69_1 | | |
| RFL 108 | Wheat-Rye-6R.300k_Assembly_Contig_86_1 | 440 | 1994 |
| RFL 108 | R0932E.300k_Assembly_Contig_87_1 | 441 | 1995 |
| RFL 108 | R197.300k_Assembly_Contig_77_1 | 442 | 1996 |
| RFL 108 | Anapurna.300k_Assembly_Contig_78_1 | 443 | 1997 |
| RFL 108 | R0934F.300k_Assembly_Contig_115_1 | 444 | 1998 |
| RFL 109 | Triticum- | 445 | 1999 |
| | timopheevii.300k_Assembly_Contig_78_2 | | |
| RFL 110 | Triticum- | 446 | 2000 |
| | timopheevii.300k_Assembly_Contig_15_2 | | |
| RFL 111 | R0932E.300k_Assembly_Contig_78_1 | 447 | 2001 |
| RFL 111 | R0934F.300k_Assembly_Contig_23_1 | 448 | 2002 |
| RFL 111 | Anapurna.300k_Assembly_Contig_58_1 | 449 | 2003 |
| RFL 111 | R197.300k_Assembly_Contig_69_1 | 450 | 2004 |
| RFL 111 | Primepii.300k_Assembly_Contig_35_1 | 451 | 2005 |
| RFL 111 | Wheat-Rye-6R.300k_Assembly_Contig_83_1 | 452 | 2006 |
| RFL 112 | R0932E.300k_Assembly_Contig_20_1 | 453 | 2007 |
| RFL 112 | R197.300k_Assembly_Contig_17_1 | 454 | 2008 |
| RFL 112 | Wheat-Rye-6R.300k_Assembly_Contig_17_1 | 455 | 2009 |
| RFL 112 | Anapurna.300k_Assembly_Contig_4_1 | 456 | 2010 |
| RFL 112 | Primepii.300k_Assembly_Contig_12_1 | 457 | 2011 |
| RFL 112 | R0934F.300k_Assembly_Contig_6_1 | 458 | 2012 |
| RFL 113 | R0932E.300k_Assembly_Contig_216_1 | 459 | 2013 |
| RFL 113 | R0934F.300k_Assembly_Contig_202_1 | 460 | 2014 |
| RFL 113 | Primepii.300k_Assembly_Contig_92_1 | 461 | 2015 |
| RFL 113 | R197.300k_Assembly_Contig_98_1 | 462 | 2016 |
| RFL 114 | R0932E.300k_Assembly_Contig_86_1 | 463 | 2017 |
| RFL 115 | R0934F.300k_Assembly_Contig_128_1 | 464 | 2018 |
| RFL 115 | Triticum- | 465 | 2019 |
| | timopheevii.300k_Assembly_Contig_74_1 | | |
| RFL 116 | Triticum- | 466 | 2020 |
| | timopheevii.300k_Assembly_Contig_44_2 | | |
| RFL 118 | R197.300k_Assembly_Contig_75_1 | 467 | 2021 |
| RFL 118 | Wheat-Rye-6R.300k_Assembly_Contig_93_1 | 468 | 2022 |
| RFL 118 | Anapurna.300k_Assembly_Contig_87_1 | 469 | 2023 |
| RFL 119 | R197.300k_Assembly_Contig_1_1 | 470 | 2024 |
| RFL 119 | Wheat-Rye-6R.300k_Assembly_Contig_1_1 | 471 | 2025 |
| RFL 119 | Wheat-Rye-6R.300k_Assembly_Contig_194_1 | 472 | 2026 |
| RFL 119 | R0934F.300k_Assembly_Contig_2_1 | 473 | 2027 |
| RFL 119 | Primepii.300k_Assembly_Contig_1_1 | 474 | 2028 |
| RFL 119 | Anapurna.300k_Assembly_Contig_1_1 | 475 | 2029 |
| RFL 119 | R0932E.300k_Assembly_Contig_1_1 | 476 | 2030 |
| RFL 120 | Triticum- | 477 | 2031 |
| | timopheevii.300k_Assembly_Contig_67_1 | | |
| RFL 121 | R197.300k_Assembly_Contig_96_1 | 478 | 2032 |
| RFL 121 | R0932E.300k_Assembly_Contig_93_1 | 479 | 2033 |
| RFL 121 | Triticum- | 480 | 2034 |
| | timopheevii.300k_Assembly_Contig_70_1 | | |
| RFL 121 | R0934F.300k_Assembly_Contig_102_1 | 481 | 2035 |
| RFL 121 | Wheat-Rye-6R.300k_Assembly_Contig_95_1 | 482 | 2036 |
| RFL 122 | Primepii.300k_Assembly_Contig_90_1 | 483 | 2037 |
| RFL 122 | R197.300k_Assembly_Contig_68_1 | 484 | 2038 |
| RFL 122 | Anapurna.300k_Assembly_Contig_63_1 | 485 | 2039 |
| RFL 122 | R0932E.300k_Assembly_Contig_91_1 | 486 | 2040 |
| RFL 122 | R0934F.300k_Assembly_Contig_97_1 | 487 | 2041 |
| RFL 122 | Triticum- | 488 | 2042 |
| | timopheevii.300k_Assembly_Contig_59_1 | | |
| RFL 122 | Wheat-Rye-6R.300k_Assembly_Contig_85_1 | 489 | 2043 |
| RFL 123 | Triticum- | 490 | 2044 |
| | timopheevii.300k_Assembly_Contig_65_1 | | |
| RFL 124 | Primepii.300k_Assembly_Contig_96_1 | 491 | 2045 |
| RFL 124 | R197.300k_Assembly_Contig_116_1 | 492 | 2046 |
| RFL 124 | R0934F.300k_Assembly_Contig_110_1 | 493 | 2047 |
| RFL 124 | Wheat-Rye-6R.300k_Assembly_Contig_92_1 | 494 | 2048 |
| RFL 124 | Anapurna.300k_Assembly_Contig_84_1 | 495 | 2049 |
| RFL 124 | R0932E.300k_Assembly_Contig_107_1 | 496 | 2050 |
| RFL 125 | Triticum- | 497 | 2051 |
| | timopheevii.300k_Assembly_Contig_40_1 | | |
| RFL 125 | Triticum- | 498 | 2052 |
| | timopheevii.300k_Assembly_Contig_41_3 | | |
| RFL 125 | R197.300k_Assembly_Contig_3_1 | 499 | 2053 |
| RFL 126 | R0932E.300k_Assembly_Contig_35_1 | 500 | 2054 |
| RFL 126 | R197.300k_Assembly_Contig_9_3 | 501 | 2055 |
| RFL 126 | R0932E.300k_Assembly_Contig_35_2 | 502 | 2056 |
| RFL 126 | Anapurna.300k_Assembly_Contig_18_3 | 503 | 2057 |
| RFL 126 | Primepii.300k_Assembly_Contig_5_3 | 504 | 2058 |
| RFL 126 | Wheat-Rye-6R.300k_Assembly_Contig_29_1 | 505 | 2059 |
| RFL 126 | R0934F.300k_Assembly_Contig_19_3 | 506 | 2060 |
| RFL 126 | Wheat-Rye-6R.300k_Assembly_Contig_14_3 | 507 | 2061 |
| RFL 126 | Triticum- | 508 | 2062 |
| | timopheevii.300k_Assembly_Contig_24_1 | | |
| RFL 126 | Primepii.300k_Assembly_Contig_43_1 | 509 | 2063 |
| RFL 126 | R0934F.300k_Assembly_Contig_30_2 | 510 | 2064 |
| RFL 126 | R0934F.300k_Assembly_Contig_30_1 | 511 | 2065 |
| RFL 126 | R197.300k_Assembly_Contig_16_1 | 512 | 2066 |
| RFL 126 | R0932E.300k_Assembly_Contig_16_3 | 513 | 2067 |
| RFL 126 | Anapurna.300k_Assembly_Contig_11_1 | 514 | 2068 |
| RFL 127 | Anapurna.300k_Assembly_Contig_73_1 | 515 | 2069 |
| RFL 128 | R197.300k_Assembly_Contig_113_2 | 516 | 2070 |
| RFL 129 | R0932E.300k_Assembly_Contig_104_1 | 517 | 2071 |
| RFL 129 | R0934F.300k_Assembly_Contig_91_1 | 518 | 2072 |
| RFL 129 | R197.300k_Assembly_Contig_101_1 | 519 | 2073 |
| RFL 130 | Triticum- | 520 | 2074 |
| | timopheevii.300k_Assembly_Contig_53_2 | | |
| RFL 131 | R0934F.300k_Assembly_Contig_106_1 | 521 | 2075 |
| RFL 131 | Anapurna.300k_Assembly_Contig_94_1 | 522 | 2076 |
| RFL 131 | Primepii.300k_Assembly_Contig_112_1 | 523 | 2077 |
| RFL 132 | R197.300k_Assembly_Contig_82_1 | 524 | 2078 |
| RFL 132 | Wheat-Rye-6R.300k_Assembly_Contig_96_1 | 525 | 2079 |
| RFL 132 | Primepii.300k_Assembly_Contig_87_1 | 526 | 2080 |
| RFL 133 | R0932E.300k_Assembly_Contig_28_2 | 527 | 2081 |
| RFL 133 | Anapurna.300k_Assembly_Contig_7_2 | 528 | 2082 |
| RFL 133 | Primepii.300k_Assembly_Contig_26_2 | 529 | 2083 |
| RFL 134 | Wheat-Rye-6R.300k_Assembly_Contig_106_1 | 530 | 2084 |
| RFL 134 | R197.300k_Assembly_Contig_100_1 | 531 | 2085 |
| RFL 134 | Primepii.300k_Assembly_Contig_102_1 | 532 | 2086 |
| RFL 135 | Triticum- | 533 | 2087 |
| | timopheevii.300k_Assembly_Contig_93_1 | | |
| RFL 136 | Primepii.300k_Assembly_Contig_73_1 | 534 | 2088 |
| RFL 136 | R0934F.300k_Assembly_Contig_77_1 | 535 | 2089 |
| RFL 136 | R0932E.300k_Assembly_Contig_65_1 | 536 | 2090 |
| RFL 136 | Anapurna.300k_Assembly_Contig_52_1 | 537 | 2091 |
| RFL 136 | Wheat-Rye-6R.300k_Assembly_Contig_84_1 | 538 | 2092 |
| RFL 136 | R197.300k_Assembly_Contig_81_1 | 539 | 2093 |
| RFL 137 | R0934F.300k_Assembly_Contig_21_3 | 540 | 2094 |
| RFL 137 | R0932E.300k_Assembly_Contig_10_3 | 541 | 2095 |
| RFL 137 | Primepii.300k_Assembly_Contig_48_3 | 542 | 2096 |
| RFL 137 | Anapurna.300k_Assembly_Contig_9_3 | 543 | 2097 |
| RFL 137 | Wheat-Rye-6R.300k_Assembly_Contig_20_3 | 544 | 2098 |
| RFL 137 | R197.300k_Assembly_Contig_2_3 | 545 | 2099 |
| RFL 138 | R0934F.300k_Assembly_Contig_201_1 | 546 | 2100 |
| RFL 138 | Triticum- | 547 | 2101 |
| | timopheevii.300k_Assembly_Contig_1_1 | | |
| RFL 138 | R0934F.300k_Assembly_Contig_1_1 | 548 | 2102 |
| RFL 139 | R0934F.300k_Assembly_Contig_74_2 | 549 | 2103 |
| RFL 139 | Primepii.300k_Assembly_Contig_79_2 | 550 | 2104 |
| RFL 139 | Wheat-Rye-6R.300k_Assembly_Contig_70_2 | 551 | 2105 |
| RFL 139 | Anapurna.300k_Assembly_Contig_64_2 | 552 | 2106 |
| RFL 140 | Primepii.300k_Assembly_Contig_105_2 | 553 | 2107 |
| RFL 140 | R0934F.300k_Assembly_Contig_56_2 | 554 | 2108 |
| RFL 141 | R0932E.300k_Assembly_Contig_75_1 | 555 | 2109 |
| RFL 141 | R0934F.300k_Assembly_Contig_50_1 | 556 | 2110 |
| RFL 142 | R0934F.300k_Assembly_Contig_76_1 | 557 | 2111 |
| RFL 142 | Primepii.300k_Assembly_Contig_75_1 | 558 | 2112 |
| RFL 143 | Wheat-Rye-6R.300k_Assembly_Contig_3_1 | 559 | 2113 |
| RFL 143 | R0934F.300k_Assembly_Contig_9_1 | 560 | 2114 |
| RFL 143 | Primepii.300k_Assembly_Contig_3_1 | 561 | 2115 |
| RFL 143 | R197.300k_Assembly_Contig_8_1 | 562 | 2116 |
| RFL 143 | R0932E.300k_Assembly_Contig_3_1 | 563 | 2117 |
| RFL 143 | Anapurna.300k_Assembly_Contig_3_1 | 564 | 2118 |
| RFL 144 | Anapurna.300k_Assembly_Contig_49_1 | 565 | 2119 |
| RFL 144 | Wheat-Rye-6R.300k_Assembly_Contig_58_1 | 566 | 2120 |
| RFL 144 | R197.300k_Assembly_Contig_56_1 | 567 | 2121 |
| RFL 144 | R0934F.300k_Assembly_Contig_40_1 | 568 | 2122 |
| RFL 144 | Primepii.300k_Assembly_Contig_58_1 | 569 | 2123 |
| RFL 144 | R0932E.300k_Assembly_Contig_50_1 | 570 | 2124 |
| RFL 145 | R0932E.300k_Assembly_Contig_62_1 | 571 | 2125 |
| RFL 145 | R0934F.300k_Assembly_Contig_52_1 | 572 | 2126 |
| RFL 145 | Anapurna.300k_Assembly_Contig_53_1 | 573 | 2127 |
| RFL 145 | Primepii.300k_Assembly_Contig_34_2 | 574 | 2128 |
| RFL 145 | R197.300k_Assembly_Contig_44_2 | 575 | 2129 |
| RFL 145 | Wheat-Rye-6R.300k_Assembly_Contig_36_2 | 576 | 2130 |
| RFL 146 | Anapurna.300k_Assembly_Contig_46_3 | 577 | 2131 |
| RFL 146 | R197.300k_Assembly_Contig_147_3 | 578 | 2132 |
| RFL 146 | Wheat-Rye-6R.300k_Assembly_Contig_18_3 | 579 | 2133 |
| RFL 146 | R0932E.300k_Assembly_Contig_42_3 | 580 | 2134 |
| RFL 147 | Anapurna.300k_Assembly_Contig_36_4 | 581 | 2135 |
| RFL 147 | R0934F.300k_Assembly_Contig_35_3 | 582 | 2136 |
| RFL 147 | Anapurna.300k_Assembly_Contig_36_3 | 583 | 2137 |
| RFL 147 | Wheat-Rye-6R.300k_Assembly_Contig_43_3 | 584 | 2138 |
| RFL 147 | R0932E.300k_Assembly_Contig_49_3 | 585 | 2139 |
| RFL 147 | R197.300k_Assembly_Contig_2_6 | 586 | 2140 |
| RFL 147 | Primepii.300k_Assembly_Contig_32_3 | 587 | 2141 |
| RFL 148 | R197.300k_Assembly_Contig_28_2 | 588 | 2142 |
| RFL 148 | R0934F.300k_Assembly_Contig_13_2 | 589 | 2143 |
| RFL 148 | Primepii.300k_Assembly_Contig_4_2 | 590 | 2144 |
| RFL 148 | R0932E.300k_Assembly_Contig_218_1 | 591 | 2145 |
| RFL 149 | Triticum- | 592 | 2146 |
| | timopheevii.300k_Assembly_Contig_18_2 | | |
| RFL 150 | Triticum- | 593 | 2147 |
| | timopheevii.300k_Assembly_Contig_66_3 | | |
| RFL 151 | R0934F.300k_Assembly_Contig_215_1 | 594 | 2148 |
| RFL 151 | Primepii.300k_Assembly_Contig_119_1 | 595 | 2149 |
| RFL 151 | R197.300k_Assembly_Contig_114_1 | 596 | 2150 |
| RFL 152 | Triticum- | 597 | 2151 |
| | timopheevii.300k_Assembly_Contig_114_1 | | |
| RFL 152 | R0934F.300k_Assembly_Contig_177_1 | 598 | 2152 |
| RFL 153 | R0932E.300k_Assembly_Contig_121_1 | 599 | 2153 |
| RFL 153 | Anapurna.300k_Assembly_Contig_124_1 | 600 | 2154 |
| RFL 153 | Primepii.300k_Assembly_Contig_126_1 | 601 | 2155 |
| RFL 153 | R0934F.300k_Assembly_Contig_206_1 | 602 | 2156 |
| RFL 153 | R0934F.300k_Assembly_Contig_147_1 | 603 | 2157 |
| RFL 154 | R0934F.300k_Assembly_Contig_174_1 | 604 | 2158 |
| RFL 154 | Primepii.300k_Assembly_Contig_143_1 | 605 | 2159 |
| RFL 154 | Primepii.300k_Assembly_Contig_120_1 | 606 | 2160 |
| RFL 154 | R0934F.300k_Assembly_Contig_134_1 | 607 | 2161 |
| RFL 154 | Primepii.300k_Assembly_Contig_125_1 | 608 | 2162 |
| RFL 154 | Wheat-Rye-6R.300k_Assembly_Contig_42_1 | 609 | 2163 |
| RFL 154 | R0934F.300k_Assembly_Contig_139_1 | 610 | 2164 |
| RFL 154 | R197.300k_Assembly_Contig_123_1 | 611 | 2165 |
| RFL 154 | R0932E.300k_Assembly_Contig_168_1 | 612 | 2166 |
| RFL 154 | R0932E.300k_Assembly_Contig_37_1 | 613 | 2167 |
| RFL 154 | Anapurna.300k_Assembly_Contig_135_1 | 614 | 2168 |
| RFL 154 | R197.300k_Assembly_Contig_140_1 | 615 | 2169 |
| RFL 154 | R197.300k_Assembly_Contig_161_1 | 616 | 2170 |
| RFL 154 | Anapurna.300k_Assembly_Contig_112_1 | 617 | 2171 |
| RFL 154 | Wheat-Rye-6R.300k_Assembly_Contig_160_1 | 618 | 2172 |
| RFL 154 | R0934F.300k_Assembly_Contig_182_1 | 619 | 2173 |
| RFL 154 | R0934F.300k_Assembly_Contig_200_1 | 620 | 2174 |
| RFL 154 | Wheat-Rye-6R.300k_Assembly_Contig_105_1 | 621 | 2175 |
| RFL 154 | Primepii.300k_Assembly_Contig_176_1 | 622 | 2176 |
| RFL 154 | R0934F.300k_Assembly_Contig_165_1 | 623 | 2177 |
| RFL 154 | Wheat-Rye-6R.300k_Assembly_Contig_200_1 | 624 | 2178 |
| RFL 154 | R197.300k_Assembly_Contig_13_1 | 625 | 2179 |
| RFL 154 | R197.300k_Assembly_Contig_158_1 | 626 | 2180 |
| RFL 154 | Primepii.300k_Assembly_Contig_160_1 | 627 | 2181 |
| RFL 154 | R0932E.300k_Assembly_Contig_156_1 | 628 | 2182 |
| RFL 154 | R0932E.300k_Assembly_Contig_179_1 | 629 | 2183 |
| RFL 154 | Anapurna.300k_Assembly_Contig_128_1 | 630 | 2184 |
| RFL 154 | Anapurna.300k_Assembly_Contig_104_1 | 631 | 2185 |
| RFL 154 | R0932E.300k_Assembly_Contig_177_1 | 632 | 2186 |
| RFL 155 | R197.300k_Assembly_Contig_127_1 | 633 | 2187 |
| RFL 155 | R0934F.300k_Assembly_Contig_109_1 | 634 | 2188 |
| RFL 155 | Wheat-Rye-6R.300k_Assembly_Contig_121_1 | 635 | 2189 |
| RFL 155 | Anapurna.300k_Assembly_Contig_108_1 | 636 | 2190 |
| RFL 155 | R0932E.300k_Assembly_Contig_122_1 | 637 | 2191 |
| RFL 155 | Primepii.300k_Assembly_Contig_110_1 | 638 | 2192 |
| RFL 156 | Wheat-Rye-6R.300k_Assembly_Contig_130_1 | 639 | 2193 |
| RFL 156 | Anapurna.300k_Assembly_Contig_117_2 | 640 | 2194 |
| RFL 156 | R0934F.300k_Assembly_Contig_176_1 | 641 | 2195 |
| RFL 156 | Anapurna.300k_Assembly_Contig_171_1 | 642 | 2196 |
| RFL 156 | R0932E.300k_Assembly_Contig_154_2 | 643 | 2197 |
| RFL 156 | Primepii.300k_Assembly_Contig_134_2 | 644 | 2198 |
| RFL 157 | Primepii.300k_Assembly_Contig_108_1 | 645 | 2199 |
| RFL 157 | R197.300k_Assembly_Contig_97_1 | 646 | 2200 |
| RFL 157 | Wheat-Rye-6R.300k_Assembly_Contig_117_1 | 647 | 2201 |
| RFL 157 | Anapurna.300k_Assembly_Contig_105_1 | 648 | 2202 |
| RFL 157 | R0932E.300k_Assembly_Contig_126_1 | 649 | 2203 |
| RFL 157 | R0934F.300k_Assembly_Contig_116_1 | 650 | 2204 |
| RFL 158 | R197.300k_Assembly_Contig_105_3 | 651 | 2205 |
| RFL 158 | Anapurna.300k_Assembly_Contig_89_3 | 652 | 2206 |
| RFL 158 | Wheat-Rye-6R.300k_Assembly_Contig_88_3 | 653 | 2207 |
| RFL 158 | R0934F.300k_Assembly_Contig_83_3 | 654 | 2208 |
| RFL 158 | Primepii.300k_Assembly_Contig_77_3 | 655 | 2209 |
| RFL 158 | R0932E.300k_Assembly_Contig_80_3 | 656 | 2210 |
| RFL 159 | Wheat-Rye-6R.300k_Assembly_Contig_177_1 | 657 | 2211 |
| RFL 159 | Wheat-Rye-6R.300k_Assembly_Contig_185_1 | 658 | 2212 |
| RFL 159 | Anapurna.300k_Assembly_Contig_176_1 | 659 | 2213 |
| RFL 159 | R197.300k_Assembly_Contig_191_1 | 660 | 2214 |
| RFL 160 | Triticum- | 661 | 2215 |
| | timopheevii.300k_Assembly_Contig_111_1 | | |
| RFL 161 | R197.300k_Assembly_Contig_28_3 | 662 | 2216 |
| RFL 161 | R0934F.300k_Assembly_Contig_13_3 | 663 | 2217 |
| RFL 161 | Anapurna.300k_Assembly_Contig_27_3 | 664 | 2218 |
| RFL 161 | R0932E.300k_Assembly_Contig_9_3 | 665 | 2219 |
| RFL 161 | Primepii.300k_Assembly_Contig_4_3 | 666 | 2220 |
| RFL 161 | R0932E.300k_Assembly_Contig_218_2 | 667 | 2221 |
| RFL 161 | Wheat-Rye-6R.300k_Assembly_Contig_4_4 | 668 | 2222 |
| RFL 162 | Triticum- | 669 | 2223 |
| | timopheevii.300k_Assembly_Contig_94_1 | | |
| RFL 163 | Primepii.300k_Assembly_Contig_128_1 | 670 | 2224 |
| RFL 163 | Wheat-Rye-6R.300k_Assembly_Contig_133_1 | 671 | 2225 |
| RFL 163 | R197.300k_Assembly_Contig_133_2 | 672 | 2226 |
| RFL 163 | R0932E.300k_Assembly_Contig_133_2 | 673 | 2227 |
| RFL 163 | R0934F.300k_Assembly_Contig_125_1 | 674 | 2228 |
| RFL 163 | Anapurna.300k_Assembly_Contig_122_2 | 675 | 2229 |
| RFL 164 | Primepii.300k_Assembly_Contig_127_1 | 676 | 2230 |
| RFL 164 | R0934F.300k_Assembly_Contig_124_1 | 677 | 2231 |
| RFL 165 | Anapurna.300k_Assembly_Contig_145_1 | 678 | 2232 |
| RFL 165 | R197.300k_Assembly_Contig_149_1 | 679 | 2233 |
| RFL 165 | Primepii.300k_Assembly_Contig_139_1 | 680 | 2234 |
| RFL 165 | R0932E.300k_Assembly_Contig_140_1 | 681 | 2235 |
| RFL 165 | Wheat-Rye-6R.300k_Assembly_Contig_139_1 | 682 | 2236 |
| RFL 165 | R0934F.300k_Assembly_Contig_132_1 | 683 | 2237 |
| RFL 166 | Primepii.300k_Assembly_Contig_130_1 | 684 | 2238 |
| RFL 166 | R0934F.300k_Assembly_Contig_122_2 | 685 | 2239 |
| RFL 167 | R197.300k_Assembly_Contig_118_1 | 686 | 2240 |
| RFL 167 | Anapurna.300k_Assembly_Contig_93_1 | 687 | 2241 |
| RFL 167 | R0932E.300k_Assembly_Contig_96_1 | 688 | 2242 |
| RFL 167 | R0934F.300k_Assembly_Contig_100_1 | 689 | 2243 |
| RFL 167 | Wheat-Rye-6R.300k_Assembly_Contig_107_1 | 690 | 2244 |
| RFL 167 | Primepii.300k_Assembly_Contig_100_1 | 691 | 2245 |
| RFL 168 | Triticum- | 692 | 2246 |
| | timopheevii.300k_Assembly_Contig_88_1 | | |
| RFL 168 | Triticum- | 693 | 2247 |
| | timopheevii.300k_Assembly_Contig_28_1 | | |
| RFL 169 | Triticum- | 694 | 2248 |
| | timopheevii.300k_Assembly_Contig_86_2 | | |
| RFL 170 | R197.300k_Assembly_Contig_94_2 | 695 | 2249 |
| RFL 170 | R0934F.300k_Assembly_Contig_67_2 | 696 | 2250 |
| RFL 170 | Primepii.300k_Assembly_Contig_60_2 | 697 | 2251 |
| RFL 170 | Wheat-Rye-6R.300k_Assembly_Contig_113_2 | 698 | 2252 |
| RFL 170 | Anapurna.300k_Assembly_Contig_174_3 | 699 | 2253 |
| RFL 171 | Triticum- | 700 | 2254 |
| | timopheevii.300k_Assembly_Contig_84_1 | | |
| RFL 171 | Triticum- | 701 | 2255 |
| | timopheevii.300k_Assembly_Contig_46_1 | | |
| RFL 172 | R0932E.300k_Assembly_Contig_67_1 | 702 | 2256 |
| RFL 172 | Wheat-Rye-6R.300k_Assembly_Contig_57_1 | 703 | 2257 |
| RFL 172 | R0934F.300k_Assembly_Contig_82_1 | 704 | 2258 |
| RFL 172 | Primepii.300k_Assembly_Contig_68_1 | 705 | 2259 |
| RFL 172 | Anapurna.300k_Assembly_Contig_32_1 | 706 | 2260 |
| RFL 172 | R197.300k_Assembly_Contig_61_1 | 707 | 2261 |
| RFL 173 | Triticum- | 708 | 2262 |
| | timopheevii.300k_Assembly_Contig_83_1 | | |
| RFL 174 | Triticum- | 709 | 2263 |
| | timopheevii.300k_Assembly_Contig_41_1 | | |
| RFL 174 | R197.300k_Assembly_Contig_102_1 | 710 | 2264 |
| RFL 174 | Triticum- | 711 | 2265 |
| | timopheevii.300k_Assembly_Contig_41_2 | | |
| RFL 175 | Primepii.300k_Assembly_Contig_200_1 | 712 | 2266 |
| RFL 175 | Primepii.300k_Assembly_Contig_162_1 | 713 | 2267 |
| RFL 175 | R0932E.300k_Assembly_Contig_144_1 | 714 | 2268 |
| RFL 175 | R0934F.300k_Assembly_Contig_156_1 | 715 | 2269 |
| RFL 175 | Anapurna.300k_Assembly_Contig_123_1 | 716 | 2270 |
| RFL 176 | R197.300k_Assembly_Contig_93_1 | 717 | 2271 |
| RFL 176 | R0934F.300k_Assembly_Contig_90_1 | 718 | 2272 |
| RFL 176 | Wheat-Rye-6R.300k_Assembly_Contig_100_1 | 719 | 2273 |
| RFL 176 | Anapurna.300k_Assembly_Contig_86_1 | 720 | 2274 |
| RFL 176 | R0932E.300k_Assembly_Contig_108_1 | 721 | 2275 |
| RFL 177 | R197.300k_Assembly_Contig_128_1 | 722 | 2276 |
| RFL 177 | Wheat-Rye-6R.300k_Assembly_Contig_126_1 | 723 | 2277 |
| RFL 177 | Anapurna.300k_Assembly_Contig_127_1 | 724 | 2278 |
| RFL 177 | R0932E.300k_Assembly_Contig_135_1 | 725 | 2279 |
| RFL 178 | Primepii.300k_Assembly_Contig_97_1 | 726 | 2280 |
| RFL 179 | Triticum- | 727 | 2281 |
| | timopheevii.300k_Assembly_Contig_89_1 | | |
| RFL 180 | R0932E.300k_Assembly_Contig_160_1 | 728 | 2282 |
| RFL 180 | Triticum- | 729 | 2283 |
| | timopheevii.300k_Assembly_Contig_97_1 | | |
| RFL 180 | Primepii.300k_Assembly_Contig_141_1 | 730 | 2284 |
| RFL 180 | R197.300k_Assembly_Contig_141_1 | 731 | 2285 |
| RFL 180 | Wheat-Rye-6R.300k_Assembly_Contig_149_1 | 732 | 2286 |
| RFL 180 | Anapurna.300k_Assembly_Contig_142_1 | 733 | 2287 |
| RFL 180 | R0934F.300k_Assembly_Contig_146_1 | 734 | 2288 |
| RFL 181 | Wheat-Rye-6R.300k_Assembly_Contig_104_1 | 735 | 2289 |
| RFL 181 | Primepii.300k_Assembly_Contig_104_1 | 736 | 2290 |
| RFL 182 | Wheat-Rye-6R.300k_Assembly_Contig_53_2 | 737 | 2291 |
| RFL 182 | R197.300k_Assembly_Contig_19_2 | 738 | 2292 |
| RFL 182 | R0932E.300k_Assembly_Contig_68_2 | 739 | 2293 |
| RFL 183 | R0932E.300k_Assembly_Contig_31_2 | 740 | 2294 |
| RFL 183 | R197.300k_Assembly_Contig_49_2 | 741 | 2295 |
| RFL 183 | R0934F.300k_Assembly_Contig_41_2 | 742 | 2296 |
| RFL 183 | Wheat-Rye-6R.300k_Assembly_Contig_27_2 | 743 | 2297 |
| RFL 183 | Triticum- | 744 | 2298 |
| | timopheevii.300k_Assembly_Contig_26_1 | | |
| RFL 183 | Anapurna.300k_Assembly_Contig_40_2 | 745 | 2299 |
| RFL 183 | Primepii.300k_Assembly_Contig_65_2 | 746 | 2300 |
| RFL 184 | R0932E.300k_Assembly_Contig_63_1 | 747 | 2301 |
| RFL 184 | R197.300k_Assembly_Contig_35_1 | 748 | 2302 |
| RFL 184 | Anapurna.300k_Assembly_Contig_170_1 | 749 | 2303 |
| RFL 184 | Wheat-Rye-6R.300k_Assembly_Contig_61_1 | 750 | 2304 |
| RFL 185 | R0934F.300k_Assembly_Contig_92_3 | 751 | 2305 |
| RFL 185 | Triticum- | 752 | 2306 |
| | timopheevii.300k_Assembly_Contig_52_3 | | |
| RFL 185 | R0932E.300k_Assembly_Contig_109_3 | 753 | 2307 |
| RFL 185 | R197.300k_Assembly_Contig_90_3 | 754 | 2308 |
| RFL 186 | Wheat-Rye-6R.300k_Assembly_Contig_131_1 | 755 | 2309 |
| RFL 186 | R0932E.300k_Assembly_Contig_141_1 | 756 | 2310 |
| RFL 186 | R197.300k_Assembly_Contig_143_1 | 757 | 2311 |
| RFL 186 | R0934F.300k_Assembly_Contig_133_1 | 758 | 2312 |
| RFL 186 | Anapurna.300k_Assembly_Contig_139_1 | 759 | 2313 |
| RFL 186 | Primepii.300k_Assembly_Contig_144_1 | 760 | 2314 |
| RFL 187 | R0934F.300k_Assembly_Contig_53_3 | 761 | 2315 |
| RFL 187 | Primepii.300k_Assembly_Contig_28_3 | 762 | 2316 |
| RFL 187 | R197.300k_Assembly_Contig_53_3 | 763 | 2317 |
| RFL 187 | R0932E.300k_Assembly_Contig_14_3 | 764 | 2318 |
| RFL 187 | Wheat-Rye-6R.300k_Assembly_Contig_49_3 | 765 | 2319 |
| RFL 187 | Anapurna.300k_Assembly_Contig_55_3 | 766 | 2320 |
| RFL 189 | Triticum- | 767 | 2321 |
| | timopheevii.300k_Assembly_Contig_23_1 | | |
| RFL 191 | R197.300k_Assembly_Contig_136_1 | 768 | 2322 |
| RFL 192 | R0934F.300k_Assembly_Contig_119_1 | 769 | 2323 |
| RFL 192 | R197.300k_Assembly_Contig_134_1 | 770 | 2324 |
| RFL 192 | Wheat-Rye-6R.300k_Assembly_Contig_125_1 | 771 | 2325 |
| RFL 192 | Primepii.300k_Assembly_Contig_133_1 | 772 | 2326 |
| RFL 192 | Anapurna.300k_Assembly_Contig_125_1 | 773 | 2327 |
| RFL 192 | R0932E.300k_Assembly_Contig_136_1 | 774 | 2328 |
| RFL 193 | R0932E.300k_Assembly_Contig_130_1 | 775 | 2329 |
| RFL 193 | R0934F.300k_Assembly_Contig_95_1 | 776 | 2330 |
| RFL 193 | Anapurna.300k_Assembly_Contig_107_1 | 777 | 2331 |
| RFL 193 | R197.300k_Assembly_Contig_110_1 | 778 | 2332 |
| RFL 194 | Primepii.300k_Assembly_Contig_107_1 | 779 | 2333 |
| RFL 194 | R197.300k_Assembly_Contig_99_1 | 780 | 2334 |
| RFL 194 | Wheat-Rye-6R.300k_Assembly_Contig_156_1 | 781 | 2335 |
| RFL 194 | R197.300k_Assembly_Contig_132_1 | 782 | 2336 |
| RFL 194 | Primepii.300k_Assembly_Contig_121_1 | 783 | 2337 |
| RFL 194 | Wheat-Rye-6R.300k_Assembly_Contig_51_1 | 784 | 2338 |
| RFL 195 | Wheat-Rye-6R.300k_Assembly_Contig_165_1 | 785 | 2339 |
| RFL 195 | R0934F.300k_Assembly_Contig_163_1 | 786 | 2340 |
| RFL 195 | R0932E.300k_Assembly_Contig_95_1 | 787 | 2341 |
| RFL 195 | Primepii.300k_Assembly_Contig_171_1 | 788 | 2342 |
| RFL 195 | Anapurna.300k_Assembly_Contig_2_4 | 789 | 2343 |
| RFL 195 | R197.300k_Assembly_Contig_176_1 | 790 | 2344 |
| RFL 196 | Anapurna.300k_Assembly_Contig_81_2 | 791 | 2345 |
| RFL 196 | R197.300k_Assembly_Contig_88_2 | 792 | 2346 |
| RFL 196 | Wheat-Rye-6R.300k_Assembly_Contig_114_2 | 793 | 2347 |
| RFL 196 | R0934F.300k_Assembly_Contig_112_2 | 794 | 2348 |
| RFL 196 | Primepii.300k_Assembly_Contig_103_2 | 795 | 2349 |
| RFL 196 | R0932E.300k_Assembly_Contig_106_2 | 796 | 2350 |
| RFL 197 | Wheat-Rye-6R.300k_Assembly_Contig_89_1 | 797 | 2351 |
| RFL 197 | R0932E.300k_Assembly_Contig_84_1 | 798 | 2352 |
| RFL 197 | R197.300k_Assembly_Contig_89_1 | 799 | 2353 |
| RFL 197 | Primepii.300k_Assembly_Contig_78_1 | 800 | 2354 |
| RFL 197 | Anapurna.300k_Assembly_Contig_65_1 | 801 | 2355 |
| RFL 197 | R0934F.300k_Assembly_Contig_105_1 | 802 | 2356 |
| RFL 198 | Wheat-Rye-6R.300k_Assembly_Contig_155_1 | 803 | 2357 |
| RFL 198 | R0934F.300k_Assembly_Contig_151_1 | 804 | 2358 |
| RFL 198 | R197.300k_Assembly_Contig_157_1 | 805 | 2359 |
| RFL 198 | Anapurna.300k_Assembly_Contig_150_1 | 806 | 2360 |
| RFL 198 | Primepii.300k_Assembly_Contig_157_1 | 807 | 2361 |
| RFL 198 | R0932E.300k_Assembly_Contig_169_1 | 808 | 2362 |
| RFL 199 | R0934F.300k_Assembly_Contig_170_1 | 809 | 2363 |
| RFL 199 | Anapurna.300k_Assembly_Contig_166_1 | 810 | 2364 |
| RFL 199 | R0932E.300k_Assembly_Contig_181_1 | 811 | 2365 |
| RFL 199 | R197.300k_Assembly_Contig_178_1 | 812 | 2366 |
| RFL 199 | Primepii.300k_Assembly_Contig_175_2 | 813 | 2367 |
| RFL 199 | Primepii.300k_Assembly_Contig_175_1 | 814 | 2368 |
| RFL 199 | Triticum- | 815 | 2369 |
| | timopheevii.300k_Assembly_Contig_110_1 | | |
| RFL 199 | Wheat-Rye-6R.300k_Assembly_Contig_171_1 | 816 | 2370 |
| RFL 200 | Wheat-Rye-6R.300k_Assembly_Contig_154_1 | 817 | 2371 |
| RFL 200 | Primepii.300k_Assembly_Contig_149_1 | 818 | 2372 |
| RFL 200 | R197.300k_Assembly_Contig_148_1 | 819 | 2373 |
| RFL 200 | Anapurna.300k_Assembly_Contig_151_1 | 820 | 2374 |
| RFL 200 | R0932E.300k_Assembly_Contig_158_1 | 821 | 2375 |
| RFL 200 | R0934F.300k_Assembly_Contig_135_1 | 822 | 2376 |
| RFL 201 | Anapurna.300k_Assembly_Contig_156_1 | 823 | 2377 |
| RFL 201 | Wheat-Rye-6R.300k_Assembly_Contig_152_1 | 824 | 2378 |
| RFL 201 | R0934F.300k_Assembly_Contig_162_1 | 825 | 2379 |
| RFL 201 | Triticum- | 826 | 2380 |
| | timopheevii.300k_Assembly_Contig_95_1 | | |
| RFL 201 | Primepii.300k_Assembly_Contig_153_1 | 827 | 2381 |
| RFL 201 | R197.300k_Assembly_Contig_162_1 | 828 | 2382 |
| RFL 201 | R0932E.300k_Assembly_Contig_159_1 | 829 | 2383 |
| RFL 202 | Anapurna.300k_Assembly_Contig_157_1 | 830 | 2384 |
| RFL 202 | Wheat-Rye-6R.300k_Assembly_Contig_164_1 | 831 | 2385 |
| RFL 202 | R197.300k_Assembly_Contig_166_1 | 832 | 2386 |
| RFL 202 | R0932E.300k_Assembly_Contig_165_1 | 833 | 2387 |
| RFL 202 | R0934F.300k_Assembly_Contig_154_1 | 834 | 2388 |
| RFL 202 | Primepii.300k_Assembly_Contig_167_1 | 835 | 2389 |
| RFL 203 | Triticum- | 836 | 2390 |
| | timopheevii.300k_Assembly_Contig_105_1 | | |
| RFL 203 | Triticum- | 837 | 2391 |
| | timopheevii.300k_Assembly_Contig_119_1 | | |
| RFL 203 | Wheat-Rye-6R.300k_Assembly_Contig_147_1 | 838 | 2392 |
| RFL 203 | R0932E.300k_Assembly_Contig_173_2 | 839 | 2393 |
| RFL 203 | R0932E.300k_Assembly_Contig_173_1 | 840 | 2394 |
| RFL 203 | Triticum- | 841 | 2395 |
| | timopheevii.300k_Assembly_Contig_3_1 | | |
| RFL 203 | Triticum- | 842 | 2396 |
| | timopheevii.300k_Assembly_Contig_120_1 | | |
| RFL 203 | R197.300k_Assembly_Contig_150_1 | 843 | 2397 |
| RFL 203 | Anapurna.300k_Assembly_Contig_153_1 | 844 | 2398 |
| RFL 203 | R0934F.300k_Assembly_Contig_157_2 | 845 | 2399 |
| RFL 203 | Primepii.300k_Assembly_Contig_156_1 | 846 | 2400 |
| RFL 203 | R0934F.300k_Assembly_Contig_157_1 | 847 | 2401 |
| RFL 204 | Triticum- | 848 | 2402 |
| | timopheevii.300k_Assembly_Contig_103_1 | | |
| RFL 204 | Triticum- | 849 | 2403 |
| | timopheevii.300k_Assembly_Contig_100_1 | | |
| RFL 205 | Triticum- | 850 | 2404 |
| | timopheevii.300k_Assembly_Contig_96_1 | | |
| RFL 205 | R0932E.300k_Assembly_Contig_155_1 | 851 | 2405 |
| RFL 205 | Anapurna.300k_Assembly_Contig_140_1 | 852 | 2406 |
| RFL 205 | Primepii.300k_Assembly_Contig_148_1 | 853 | 2407 |
| RFL 205 | R197.300k_Assembly_Contig_151_1 | 854 | 2408 |
| RFL 205 | R0934F.300k_Assembly_Contig_159_1 | 855 | 2409 |
| RFL 205 | Wheat-Rye-6R.300k_Assembly_Contig_151_1 | 856 | 2410 |
| RFL 206 | R0932E.300k_Assembly_Contig_117_1 | 857 | 2411 |
| RFL 207 | Triticum- | 858 | 2412 |
| | timopheevii.300k_Assembly_Contig_62_1 | | |
| RFL 208 | Wheat-Rye-6R.300k_Assembly_Contig_136_1 | 859 | 2413 |
| RFL 209 | Wheat-Rye-6R.300k_Assembly_Contig_143_1 | 860 | 2414 |
| RFL 209 | R0934F.300k_Assembly_Contig_140_1 | 861 | 2415 |
| RFL 209 | R0932E.300k_Assembly_Contig_174_1 | 862 | 2416 |
| RFL 209 | R197.300k_Assembly_Contig_154_1 | 863 | 2417 |
| RFL 209 | Primepii.300k_Assembly_Contig_152_1 | 864 | 2418 |
| RFL 209 | Anapurna.300k_Assembly_Contig_141_1 | 865 | 2419 |
| RFL 210 | Wheat-Rye-6R.300k_Assembly_Contig_163_1 | 866 | 2420 |
| RFL 210 | Anapurna.300k_Assembly_Contig_149_1 | 867 | 2421 |
| RFL 210 | R0934F.300k_Assembly_Contig_152_1 | 868 | 2422 |
| RFL 210 | R197.300k_Assembly_Contig_168_1 | 869 | 2423 |
| RFL 210 | R0932E.300k_Assembly_Contig_172_1 | 870 | 2424 |
| RFL 210 | Primepii.300k_Assembly_Contig_166_1 | 871 | 2425 |
| RFL 211 | Triticum- | 872 | 2426 |
| | timopheevii.300k_Assembly_Contig_99_1 | | |
| RFL 212 | R0932E.300k_Assembly_Contig_99_1 | 873 | 2427 |
| RFL 212 | R197.300k_Assembly_Contig_85_2 | 874 | 2428 |
| RFL 212 | R0932E.300k_Assembly_Contig_97_2 | 875 | 2429 |
| RFL 212 | Triticum- | 876 | 2430 |
| | timopheevii.300k_Assembly_Contig_73_1 | | |
| RFL 212 | R0934F.300k_Assembly_Contig_94_2 | 877 | 2431 |
| RFL 212 | Wheat-Rye-6R.300k_Assembly_Contig_91_1 | 878 | 2432 |
| RFL 212 | Primepii.300k_Assembly_Contig_76_2 | 879 | 2433 |
| RFL 212 | R197.300k_Assembly_Contig_109_1 | 880 | 2434 |
| RFL 212 | Primepii.300k_Assembly_Contig_99_1 | 881 | 2435 |
| RFL 212 | R0934F.300k_Assembly_Contig_107_1 | 882 | 2436 |
| RFL 212 | Wheat-Rye-6R.300k_Assembly_Contig_68_2 | 883 | 2437 |
| RFL 212 | Anapurna.300k_Assembly_Contig_96_1 | 884 | 2438 |
| RFL 212 | Triticum- | 885 | 2439 |
| | timopheevii.300k_Assembly_Contig_132_1 | | |
| RFL 212 | Anapurna.300k_Assembly_Contig_75_2 | 886 | 2440 |
| RFL 213 | Primepii.300k_Assembly_Contig_61_2 | 887 | 2441 |
| RFL 213 | Wheat-Rye-6R.300k_Assembly_Contig_64_2 | 888 | 2442 |
| RFL 213 | Anapurna.300k_Assembly_Contig_69_2 | 889 | 2443 |
| RFL 213 | R0934F.300k_Assembly_Contig_65_2 | 890 | 2444 |
| RFL 213 | R197.300k_Assembly_Contig_48_2 | 891 | 2445 |
| RFL 213 | R0932E.300k_Assembly_Contig_70_2 | 892 | 2446 |
| RFL 215 | Triticum- | 893 | 2447 |
| | timopheevii.300k_Assembly_Contig_98_1 | | |
| RFL 216 | R197.300k_Assembly_Contig_96_2 | 894 | 2448 |
| RFL 216 | R0932E.300k_Assembly_Contig_93_2 | 895 | 2449 |
| RFL 216 | Anapurna.300k_Assembly_Contig_126_1 | 896 | 2450 |
| RFL 216 | R0934F.300k_Assembly_Contig_102_2 | 897 | 2451 |
| RFL 217 | Triticum- | 898 | 2452 |
| | timopheevii.300k_Assembly_Contig_16_2 | | |
| RFL 218 | Primepii.300k_Assembly_Contig_95_2 | 899 | 2453 |
| RFL 218 | Wheat-Rye-6R.300k_Assembly_Contig_166_1 | 900 | 2454 |
| RFL 218 | R197.300k_Assembly_Contig_112_2 | 901 | 2455 |
| RFL 219 | R0932E.300k_Assembly_Contig_105_1 | 902 | 2456 |
| RFL 219 | Wheat-Rye-6R.300k_Assembly_Contig_110_1 | 903 | 2457 |
| RFL 219 | R197.300k_Assembly_Contig_87_1 | 904 | 2458 |
| RFL 219 | Anapurna.300k_Assembly_Contig_91_1 | 905 | 2459 |
| RFL 219 | R0934F.300k_Assembly_Contig_101_1 | 906 | 2460 |
| RFL 219 | Primepii.300k_Assembly_Contig_98_1 | 907 | 2461 |
| RFL 220 | Primepii.300k_Assembly_Contig_115_2 | 908 | 2462 |
| RFL 220 | Wheat-Rye-6R.300k_Assembly_Contig_108_2 | 909 | 2463 |
| RFL 221 | R0934F.300k_Assembly_Contig_47_2 | 910 | 2464 |
| RFL 221 | R0932E.300k_Assembly_Contig_33_2 | 911 | 2465 |
| RFL 221 | Wheat-Rye-6R.300k_Assembly_Contig_16_2 | 912 | 2466 |
| RFL 221 | Anapurna.300k_Assembly_Contig_30_2 | 913 | 2467 |
| RFL 221 | R197.300k_Assembly_Contig_52_2 | 914 | 2468 |
| RFL 221 | Primepii.300k_Assembly_Contig_15_2 | 915 | 2469 |
| RFL 222 | Wheat-Rye-6R.300k_Assembly_Contig_97_1 | 916 | 2470 |
| RFL 222 | R197.300k_Assembly_Contig_108_1 | 917 | 2471 |
| RFL 222 | Anapurna.300k_Assembly_Contig_101_1 | 918 | 2472 |
| RFL 223 | R0934F.300k_Assembly_Contig_58_2 | 919 | 2473 |
| RFL 223 | Anapurna.300k_Assembly_Contig_25_3 | 920 | 2474 |
| RFL 223 | Wheat-Rye-6R.300k_Assembly_Contig_46_3 | 921 | 2475 |
| RFL 223 | R197.300k_Assembly_Contig_45_3 | 922 | 2476 |
| RFL 223 | R0932E.300k_Assembly_Contig_219_3 | 923 | 2477 |
| RFL 223 | Primepii.300k_Assembly_Contig_36_2 | 924 | 2478 |
| RFL 223 | R0932E.300k_Assembly_Contig_57_3 | 925 | 2479 |
| RFL 224 | R0932E.300k_Assembly_Contig_212_1 | 926 | 2480 |
| RFL 225 | R0932E.300k_Assembly_Contig_117_2 | 927 | 2481 |
| RFL 226 | R0932E.300k_Assembly_Contig_67_2 | 928 | 2482 |
| RFL 226 | Primepii.300k_Assembly_Contig_118_1 | 929 | 2483 |
| RFL 226 | Wheat-Rye-6R.300k_Assembly_Contig_101_1 | 930 | 2484 |
| RFL 226 | Wheat-Rye-6R.300k_Assembly_Contig_57_2 | 931 | 2485 |
| RFL 226 | R0934F.300k_Assembly_Contig_82_2 | 932 | 2486 |
| RFL 226 | Anapurna.300k_Assembly_Contig_95_1 | 933 | 2487 |
| RFL 226 | R0934F.300k_Assembly_Contig_98_1 | 934 | 2488 |
| RFL 226 | Primepii.300k_Assembly_Contig_68_2 | 935 | 2489 |
| RFL 226 | Anapurna.300k_Assembly_Contig_32_2 | 936 | 2490 |
| RFL 226 | R197.300k_Assembly_Contig_61_2 | 937 | 2491 |
| RFL 227 | R0934F.300k_Assembly_Contig_62_1 | 938 | 2492 |
| RFL 227 | Primepii.300k_Assembly_Contig_196_1 | 939 | 2493 |
| RFL 228 | R197.300k_Assembly_Contig_85_1 | 940 | 2494 |
| RFL 228 | Wheat-Rye-6R.300k_Assembly_Contig_68_1 | 941 | 2495 |
| RFL 228 | R0934F.300k_Assembly_Contig_94_1 | 942 | 2496 |
| RFL 228 | R0932E.300k_Assembly_Contig_97_1 | 943 | 2497 |
| RFL 228 | Anapurna.300k_Assembly_Contig_75_1 | 944 | 2498 |
| RFL 228 | Primepii.300k_Assembly_Contig_76_1 | 945 | 2499 |
| RFL 229 | R0932E.300k_Assembly_Contig_30_3 | 946 | 2500 |
| RFL 229 | R197.300k_Assembly_Contig_26_5 | 947 | 2501 |
| RFL 229 | Anapurna.300k_Assembly_Contig_26_4 | 948 | 2502 |
| RFL 229 | Wheat-Rye-6R.300k_Assembly_Contig_24_5 | 949 | 2503 |
| RFL 229 | Primepii.300k_Assembly_Contig_33_3 | 950 | 2504 |
| RFL 229 | R0934F.300k_Assembly_Contig_16_5 | 951 | 2505 |
| RFL 230 | R0932E.300k_Assembly_Contig_209_2 | 952 | 2506 |
| RFL 231 | R0932E.300k_Assembly_Contig_36_1 | 953 | 2507 |
| RFL 231 | R0934F.300k_Assembly_Contig_42_1 | 954 | 2508 |
| RFL 231 | R197.300k_Assembly_Contig_55_1 | 955 | 2509 |
| RFL 231 | Anapurna.300k_Assembly_Contig_44_1 | 956 | 2510 |
| RFL 231 | Wheat-Rye-6R.300k_Assembly_Contig_33_1 | 957 | 2511 |
| RFL 231 | Primepii.300k_Assembly_Contig_54_1 | 958 | 2512 |
| RFL 232 | R0932E.300k_Assembly_Contig_171_1 | 959 | 2513 |
| RFL 232 | Primepii.300k_Assembly_Contig_173_1 | 960 | 2514 |
| RFL 232 | Wheat-Rye-6R.300k_Assembly_Contig_168_1 | 961 | 2515 |
| RFL 232 | R197.300k_Assembly_Contig_177_1 | 962 | 2516 |
| RFL 232 | Anapurna.300k_Assembly_Contig_165_1 | 963 | 2517 |
| RFL 232 | R0934F.300k_Assembly_Contig_158_1 | 964 | 2518 |
| RFL 234 | Triticum- | 965 | 2519 |
| | timopheevii.300k_Assembly_Contig_101_1 | | |
| RFL 235 | Triticum- | 966 | 2520 |
| | timopheevii.300k_Assembly_Contig_75_1 | | |
| RFL 236 | R0934F.300k_Assembly_Contig_33_2 | 967 | 2521 |
| RFL 236 | R0932E.300k_Assembly_Contig_52_1 | 968 | 2522 |
| RFL 236 | Primepii.300k_Assembly_Contig_29_3 | 969 | 2523 |
| RFL 236 | Wheat-Rye-6R.300k_Assembly_Contig_38_1 | 970 | 2524 |
| RFL 236 | R197.300k_Assembly_Contig_50_2 | 971 | 2525 |
| RFL 236 | Anapurna.300k_Assembly_Contig_34_2 | 972 | 2526 |
| RFL 237 | R0934F.300k_Assembly_Contig_118_1 | 973 | 2527 |
| RFL 237 | Triticum- | 974 | 2528 |
| | timopheevii.300k_Assembly_Contig_82_1 | | |
| RFL 238 | Primepii.300k_Assembly_Contig_29_4 | 975 | 2529 |
| RFL 238 | R0934F.300k_Assembly_Contig_33_3 | 976 | 2530 |
| RFL 238 | Anapurna.300k_Assembly_Contig_34_3 | 977 | 2531 |
| RFL 238 | R0932E.300k_Assembly_Contig_52_2 | 978 | 2532 |
| RFL 238 | Wheat-Rye-6R.300k_Assembly_Contig_38_2 | 979 | 2533 |
| RFL 238 | R197.300k_Assembly_Contig_50_3 | 980 | 2534 |
| RFL 239 | Anapurna.300k_Assembly_Contig_92_1 | 981 | 2535 |
| RFL 239 | Wheat-Rye-6R.300k_Assembly_Contig_103_1 | 982 | 2536 |
| RFL 240 | Primepii.300k_Assembly_Contig_140_1 | 983 | 2537 |
| RFL 240 | R197.300k_Assembly_Contig_156_1 | 984 | 2538 |
| RFL 240 | R0932E.300k_Assembly_Contig_148_1 | 985 | 2539 |
| RFL 240 | R0934F.300k_Assembly_Contig_136_1 | 986 | 2540 |
| RFL 241 | Primepii.300k_Assembly_Contig_138_1 | 987 | 2541 |
| RFL 241 | Wheat-Rye-6R.300k_Assembly_Contig_134_2 | 988 | 2542 |
| RFL 241 | R197.300k_Assembly_Contig_164_2 | 989 | 2543 |
| RFL 241 | R0932E.300k_Assembly_Contig_143_1 | 990 | 2544 |
| RFL 241 | Anapurna.300k_Assembly_Contig_136_1 | 991 | 2545 |
| RFL 241 | R0934F.300k_Assembly_Contig_137_1 | 992 | 2546 |
| RFL 242 | Anapurna.300k_Assembly_Contig_72_1 | 993 | 2547 |
| RFL 243 | Anapurna.300k_Assembly_Contig_8_2 | 994 | 2548 |
| RFL 244 | Anapurna.300k_Assembly_Contig_164_1 | 995 | 2549 |
| RFL 245 | R0934F.300k_Assembly_Contig_58_1 | 996 | 2550 |
| RFL 245 | Anapurna.300k_Assembly_Contig_25_2 | 997 | 2551 |
| RFL 245 | R0932E.300k_Assembly_Contig_57_2 | 998 | 2552 |
| RFL 245 | Wheat-Rye-6R.300k_Assembly_Contig_46_2 | 999 | 2553 |
| RFL 245 | R197.300k_Assembly_Contig_45_2 | 1000 | 2554 |
| RFL 245 | Primepii.300k_Assembly_Contig_36_1 | 1001 | 2555 |
| RFL 245 | R0932E.300k_Assembly_Contig_219_2 | 1002 | 2556 |
| RFL 246 | Primepii.300k_Assembly_Contig_116_2 | 1003 | 2557 |
| RFL 246 | Anapurna.300k_Assembly_Contig_90_3 | 1004 | 2558 |
| RFL 246 | R197.300k_Assembly_Contig_125_2 | 1005 | 2559 |
| RFL 246 | Wheat-Rye-6R.300k_Assembly_Contig_102_2 | 1006 | 2560 |
| RFL 246 | R0934F.300k_Assembly_Contig_96_2 | 1007 | 2561 |
| RFL 246 | R0932E.300k_Assembly_Contig_125_2 | 1008 | 2562 |
| RFL 247 | R0932E.300k_Assembly_Contig_53_1 | 1009 | 2563 |
| RFL 247 | R0934F.300k_Assembly_Contig_26_1 | 1010 | 2564 |
| RFL 247 | Primepii.300k_Assembly_Contig_40_1 | 1011 | 2565 |
| RFL 247 | Anapurna.300k_Assembly_Contig_29_1 | 1012 | 2566 |
| RFL 247 | R197.300k_Assembly_Contig_36_1 | 1013 | 2567 |
| RFL 247 | Wheat-Rye-6R.300k_Assembly_Contig_28_1 | 1014 | 2568 |
| RFL 247 | Triticum- | 1015 | 2569 |
| | timopheevii.300k_Assembly_Contig_25_1 | | |
| RFL 248 | R0934F.300k_Assembly_Contig_183_1 | 1016 | 2570 |
| RFL 248 | Wheat-Rye-6R.300k_Assembly_Contig_176_1 | 1017 | 2571 |
| RFL 248 | R0932E.300k_Assembly_Contig_180_1 | 1018 | 2572 |
| RFL 249 | Anapurna.300k_Assembly_Contig_130_1 | 1019 | 2573 |
| RFL 249 | Wheat-Rye-6R.300k_Assembly_Contig_128_1 | 1020 | 2574 |
| RFL 249 | R197.300k_Assembly_Contig_144_1 | 1021 | 2575 |
| RFL 249 | R0934F.300k_Assembly_Contig_131_1 | 1022 | 2576 |
| RFL 249 | R0932E.300k_Assembly_Contig_137_1 | 1023 | 2577 |
| RFL 249 | Primepii.300k_Assembly_Contig_135_1 | 1024 | 2578 |
| RFL 250 | Wheat-Rye-6R.300k_Assembly_Contig_47_2 | 1025 | 2579 |
| RFL 250 | Primepii.300k_Assembly_Contig_69_2 | 1026 | 2580 |
| RFL 250 | R0932E.300k_Assembly_Contig_69_2 | 1027 | 2581 |
| RFL 250 | Anapurna.300k_Assembly_Contig_56_2 | 1028 | 2582 |
| RFL 250 | R0934F.300k_Assembly_Contig_59_2 | 1029 | 2583 |
| RFL 250 | R197.300k_Assembly_Contig_91_2 | 1030 | 2584 |
| RFL 251 | R197.300k_Assembly_Contig_26_6 | 1031 | 2585 |
| RFL 251 | Triticum- | 1032 | 2586 |
| | timopheevii.300k_Assembly_Contig_108_1 | | |
| RFL 251 | Anapurna.300k_Assembly_Contig_26_5 | 1033 | 2587 |
| RFL 251 | R0932E.300k_Assembly_Contig_30_4 | 1034 | 2588 |
| RFL 251 | Wheat-Rye-6R.300k_Assembly_Contig_24_6 | 1035 | 2589 |
| RFL 251 | Primepii.300k_Assembly_Contig_33_4 | 1036 | 2590 |
| RFL 251 | R0934F.300k_Assembly_Contig_16_6 | 1037 | 2591 |
| RFL 252 | Primepii.300k_Assembly_Contig_189_1 | 1038 | 2592 |
| RFL 252 | R0934F.300k_Assembly_Contig_169_1 | 1039 | 2593 |
| RFL 253 | Wheat-Rye-6R.300k_Assembly_Contig_112_2 | 1040 | 2594 |
| RFL 253 | R0932E.300k_Assembly_Contig_111_2 | 1041 | 2595 |
| RFL 253 | R0934F.300k_Assembly_Contig_130_2 | 1042 | 2596 |
| RFL 253 | Anapurna.300k_Assembly_Contig_88_2 | 1043 | 2597 |
| RFL 254 | R0932E.300k_Assembly_Contig_119_2 | 1044 | 2598 |
| RFL 254 | R0934F.300k_Assembly_Contig_108_2 | 1045 | 2599 |
| RFL 254 | Triticum- | 1046 | 2600 |
| | timopheevii.300k_Assembly_Contig_77_2 | | |
| RFL 254 | R197.300k_Assembly_Contig_122_2 | 1047 | 2601 |
| RFL 254 | Wheat-Rye-6R.300k_Assembly_Contig_116_2 | 1048 | 2602 |
| RFL 254 | Anapurna.300k_Assembly_Contig_103_2 | 1049 | 2603 |
| RFL 254 | Primepii.300k_Assembly_Contig_101_2 | 1050 | 2604 |
| RFL 255 | R0934F.300k_Assembly_Contig_212_1 | 1051 | 2605 |
| RFL 256 | Wheat-Rye-6R.300k_Assembly_Contig_76_1 | 1052 | 2606 |
| RFL 256 | R0934F.300k_Assembly_Contig_79_1 | 1053 | 2607 |
| RFL 256 | Triticum- | 1054 | 2608 |
| | timopheevii.300k_Assembly_Contig_32_1 | | |
| RFL 256 | R0932E.300k_Assembly_Contig_81_1 | 1055 | 2609 |
| RFL 256 | Anapurna.300k_Assembly_Contig_67_1 | 1056 | 2610 |
| RFL 256 | Primepii.300k_Assembly_Contig_89_1 | 1057 | 2611 |
| RFL 256 | R197.300k_Assembly_Contig_74_1 | 1058 | 2612 |
| RFL 257 | Primepii.300k_Assembly_Contig_71_1 | 1059 | 2613 |
| RFL 257 | Wheat-Rye-6R.300k_Assembly_Contig_78_1 | 1060 | 2614 |
| RFL 257 | R0932E.300k_Assembly_Contig_101_1 | 1061 | 2615 |
| RFL 257 | R0934F.300k_Assembly_Contig_85_1 | 1062 | 2616 |
| RFL 257 | R197.300k_Assembly_Contig_76_1 | 1063 | 2617 |
| RFL 257 | Anapurna.300k_Assembly_Contig_79_1 | 1064 | 2618 |
| RFL 258 | Primepii.300k_Assembly_Contig_41_1 | 1065 | 2619 |
| RFL 259 | Triticum- | 1066 | 2620 |
| | timopheevii.300k_Assembly_Contig_76_2 | | |
| RFL 260 | Anapurna.300k_Assembly_Contig_155_1 | 1067 | 2621 |
| RFL 260 | R0932E.300k_Assembly_Contig_163_2 | 1068 | 2622 |
| RFL 260 | R0934F.300k_Assembly_Contig_160_1 | 1069 | 2623 |
| RFL 260 | Wheat-Rye-6R.300k_Assembly_Contig_162_1 | 1070 | 2624 |
| RFL 260 | R197.300k_Assembly_Contig_171_1 | 1071 | 2625 |
| RFL 260 | Primepii.300k_Assembly_Contig_146_1 | 1072 | 2626 |
| RFL 261 | Triticum- | 1073 | 2627 |
| | timopheevii.300k_Assembly_Contig_90_2 | | |
| RFL 262 | Primepii.300k_Assembly_Contig_172_1 | 1074 | 2628 |
| RFL 262 | Wheat-Rye-6R.300k_Assembly_Contig_159_1 | 1075 | 2629 |
| RFL 262 | R197.300k_Assembly_Contig_167_1 | 1076 | 2630 |
| RFL 263 | R197.300k_Assembly_Contig_126_1 | 1077 | 2631 |
| RFL 263 | Wheat-Rye-6R.300k_Assembly_Contig_157_1 | 1078 | 2632 |
| RFL 263 | Wheat-Rye-6R.300k_Assembly_Contig_189_1 | 1079 | 2633 |
| RFL 263 | R0932E.300k_Assembly_Contig_132_1 | 1080 | 2634 |
| RFL 263 | Anapurna.300k_Assembly_Contig_114_1 | 1081 | 2635 |
| RFL 264 | Triticum- | 1082 | 2636 |
| | timopheevii.300k_Assembly_Contig_64_1 | | |
| RFL 265 | R197.300k_Assembly_Contig_129_1 | 1083 | 2637 |
| RFL 265 | R0934F.300k_Assembly_Contig_120_1 | 1084 | 2638 |
| RFL 265 | Wheat-Rye-6R.300k_Assembly_Contig_118_1 | 1085 | 2639 |
| RFL 265 | Anapurna.300k_Assembly_Contig_102_1 | 1086 | 2640 |
| RFL 265 | Triticum- | 1087 | 2641 |
| | timopheevii.300k_Assembly_Contig_79_1 | | |
| RFL 265 | Primepii.300k_Assembly_Contig_123_1 | 1088 | 2642 |
| RFL 265 | R0932E.300k_Assembly_Contig_127_1 | 1089 | 2643 |
| RFL 266 | Triticum- | 1090 | 2644 |
| | timopheevii.300k_Assembly_Contig_17_2 | | |
| RFL 267 | Triticum- | 1091 | 2645 |
| | timopheevii.300k_Assembly_Contig_90_3 | | |
| RFL 268 | R197.300k_Assembly_Contig_90_4 | 1092 | 2646 |
| RFL 268 | Triticum- | 1093 | 2647 |
| | timopheevii.300k_Assembly_Contig_52_4 | | |
| RFL 268 | R0934F.300k_Assembly_Contig_92_4 | 1094 | 2648 |
| RFL 268 | R0932E.300k_Assembly_Contig_109_4 | 1095 | 2649 |
| RFL 269 | Triticum- | 1096 | 2650 |
| | timopheevii.300k_Assembly_Contig_84_2 | | |
| RFL 270 | Triticum- | 1097 | 2651 |
| | timopheevii.300k_Assembly_Contig_56_1 | | |
| RFL 271 | R0932E.300k_Assembly_Contig_167_1 | 1098 | 2652 |
| RFL 272 | Triticum- | 1099 | 2653 |
| | timopheevii.300k_Assembly_Contig_17_1 | | |
| RFL 273 | Primepii.300k_Assembly_Contig_84_2 | 1100 | 2654 |
| RFL 273 | R0932E.300k_Assembly_Contig_212_2 | 1101 | 2655 |
| RFL 273 | R0934F.300k_Assembly_Contig_62_2 | 1102 | 2656 |
| RFL 274 | Triticum- | 1103 | 2657 |
| | timopheevii.300k_Assembly_Contig_87_1 | | |
| RFL 275 | Anapurna.300k_Assembly_Contig_208_1 | 1104 | 2658 |
| RFL 276 | R0934F.300k_Assembly_Contig_42_2 | 1105 | 2659 |
| RFL 276 | R197.300k_Assembly_Contig_55_2 | 1106 | 2660 |
| RFL 276 | R0932E.300k_Assembly_Contig_36_2 | 1107 | 2661 |
| RFL 276 | Primepii.300k_Assembly_Contig_54_2 | 1108 | 2662 |
| RFL 276 | Wheat-Rye-6R.300k_Assembly_Contig_33_2 | 1109 | 2663 |
| RFL 276 | Anapurna.300k_Assembly_Contig_44_2 | 1110 | 2664 |
| RFL 277 | Triticum- | 1111 | 2665 |
| | timopheevii.300k_Assembly_Contig_2_1 | | |
| RFL 277 | R0934F.300k_Assembly_Contig_3_1 | 1112 | 2666 |
| RFL 278 | Triticum- | 1113 | 2667 |
| | timopheevii.300k_Assembly_Contig_85_2 | | |
| RFL 279 | Wheat-Rye-6R.300k_Assembly_Contig_56_2 | 1114 | 2668 |
| RFL 279 | R0934F.300k_Assembly_Contig_60_2 | 1115 | 2669 |
| RFL 279 | Anapurna.300k_Assembly_Contig_60_3 | 1116 | 2670 |
| RFL 279 | Primepii.300k_Assembly_Contig_56_3 | 1117 | 2671 |
| RFL 279 | R197.300k_Assembly_Contig_60_2 | 1118 | 2672 |
| RFL 279 | R0932E.300k_Assembly_Contig_2_2 | 1119 | 2673 |
| RFL 280 | R0934F.300k_Assembly_Contig_129_1 | 1120 | 2674 |
| RFL 280 | R197.300k_Assembly_Contig_139_1 | 1121 | 2675 |
| RFL 280 | Anapurna.300k_Assembly_Contig_129_1 | 1122 | 2676 |
| RFL 280 | Wheat-Rye-6R.300k_Assembly_Contig_127_1 | 1123 | 2677 |
| RFL 280 | Primepii.300k_Assembly_Contig_136_2 | 1124 | 2678 |
| RFL 280 | R0932E.300k_Assembly_Contig_138_1 | 1125 | 2679 |
| RFL 281 | Triticum- | 1126 | 2680 |
| | timopheevii.300k_Assembly_Contig_23_2 | | |
| RFL 282 | R197.300k_Assembly_Contig_181_1 | 1127 | 2681 |
| RFL 282 | Wheat-Rye-6R.300k_Assembly_Contig_186_1 | 1128 | 2682 |
| RFL 282 | R0932E.300k_Assembly_Contig_95_2 | 1129 | 2683 |
| RFL 282 | Primepii.300k_Assembly_Contig_177_1 | 1130 | 2684 |
| RFL 282 | R0934F.300k_Assembly_Contig_155_1 | 1131 | 2685 |
| RFL 282 | Wheat-Rye-6R.300k_Assembly_Contig_119_1 | 1132 | 2686 |
| RFL 282 | R197.300k_Assembly_Contig_106_1 | 1133 | 2687 |
| RFL 282 | Primepii.300k_Assembly_Contig_161_1 | 1134 | 2688 |
| RFL 282 | Anapurna.300k_Assembly_Contig_160_1 | 1135 | 2689 |
| RFL 282 | R197.300k_Assembly_Contig_219_1 | 1136 | 2690 |
| RFL 282 | Anapurna.300k_Assembly_Contig_198_1 | 1137 | 2691 |
| RFL 282 | Anapurna.300k_Assembly_Contig_100_1 | 1138 | 2692 |
| RFL 282 | Wheat-Rye-6R.300k_Assembly_Contig_170_1 | 1139 | 2693 |
| RFL 283 | R0934F.300k_Assembly_Contig_79_2 | 1140 | 2694 |
| RFL 283 | Wheat-Rye-6R.300k_Assembly_Contig_76_2 | 1141 | 2695 |
| RFL 283 | Triticum- | 1142 | 2696 |
| | timopheevii.300k_Assembly_Contig_32_2 | | |
| RFL 283 | Primepii.300k_Assembly_Contig_89_2 | 1143 | 2697 |
| RFL 283 | R197.300k_Assembly_Contig_74_2 | 1144 | 2698 |
| RFL 283 | R0932E.300k_Assembly_Contig_81_2 | 1145 | 2699 |
| RFL 283 | Anapurna.300k_Assembly_Contig_67_2 | 1146 | 2700 |
| RFL 284 | Primepii.300k_Assembly_Contig_84_1 | 1147 | 2701 |
| RFL 285 | Primepii.300k_Assembly_Contig_111_2 | 1148 | 2702 |
| RFL 286 | Triticum- | 1149 | 2703 |
| | timopheevii.300k_Assembly_Contig_55_2 | | |
| RFL 287 | Anapurna.300k_Assembly_Contig_154_2 | 1150 | 2704 |
| RFL 287 | Wheat-Rye-6R.300k_Assembly_Contig_142_2 | 1151 | 2705 |
| RFL 287 | R197.300k_Assembly_Contig_153_2 | 1152 | 2706 |
| RFL 287 | Primepii.300k_Assembly_Contig_158_2 | 1153 | 2707 |
| RFL 288 | Primepii.300k_Assembly_Contig_60_1 | 1154 | 2708 |
| RFL 288 | R0934F.300k_Assembly_Contig_67_1 | 1155 | 2709 |
| RFL 289 | R0932E.300k_Assembly_Contig_206_2 | 1156 | 2710 |
| RFL 290 | R0932E.300k_Assembly_Contig_166_2 | 1157 | 2711 |
| RFL 290 | R0934F.300k_Assembly_Contig_166_2 | 1158 | 2712 |
| RFL 290 | Primepii.300k_Assembly_Contig_174_2 | 1159 | 2713 |
| RFL 290 | R197.300k_Assembly_Contig_174_2 | 1160 | 2714 |
| RFL 290 | Anapurna.300k_Assembly_Contig_161_2 | 1161 | 2715 |
| RFL 290 | Wheat-Rye-6R.300k_Assembly_Contig_161_2 | 1162 | 2716 |
| RFL 291 | Anapurna.300k_Assembly_Contig_27_2 | 1163 | 2717 |
| RFL 291 | R0932E.300k_Assembly_Contig_9_2 | 1164 | 2718 |
| RFL 291 | Wheat-Rye-6R.300k_Assembly_Contig_4_3 | 1165 | 2719 |
| RFL 292 | Triticum- | 1166 | 2720 |
| | timopheevii.300k_Assembly_Contig_68_2 | | |
| RFL 293 | R197.300k_Assembly_Contig_73_1 | 1167 | 2721 |
| RFL 294 | Primepii.300k_Assembly_Contig_116_1 | 1168 | 2722 |
| RFL 294 | Wheat-Rye-6R.300k_Assembly_Contig_102_1 | 1169 | 2723 |
| RFL 294 | Anapurna.300k_Assembly_Contig_90_2 | 1170 | 2724 |
| RFL 294 | R197.300k_Assembly_Contig_125_1 | 1171 | 2725 |
| RFL 294 | R0934F.300k_Assembly_Contig_96_1 | 1172 | 2726 |
| RFL 294 | R0932E.300k_Assembly_Contig_125_1 | 1173 | 2727 |
| RFL 295 | Triticum- | 1174 | 2728 |
| | timopheevii.300k_Assembly_Contig_112_1 | | |
| RFL 296 | R197.300k_Assembly_Contig_159_1 | 1175 | 2729 |
| RFL 296 | Wheat-Rye-6R.300k_Assembly_Contig_146_1 | 1176 | 2730 |
| RFL 296 | Primepii.300k_Assembly_Contig_154_1 | 1177 | 2731 |
| RFL 296 | R0934F.300k_Assembly_Contig_144_1 | 1178 | 2732 |
| RFL 296 | Anapurna.300k_Assembly_Contig_152_1 | 1179 | 2733 |
| RFL 296 | R0932E.300k_Assembly_Contig_149_1 | 1180 | 2734 |
| RFL 297 | R0932E.300k_Assembly_Contig_129_1 | 1181 | 2735 |
| RFL 297 | Anapurna.300k_Assembly_Contig_120_1 | 1182 | 2736 |
| RFL 297 | Primepii.300k_Assembly_Contig_129_1 | 1183 | 2737 |
| RFL 297 | R197.300k_Assembly_Contig_145_1 | 1184 | 2738 |
| RFL 297 | R0934F.300k_Assembly_Contig_121_1 | 1185 | 2739 |
| RFL 297 | Wheat-Rye-6R.300k_Assembly_Contig_129_1 | 1186 | 2740 |
| RFL 298 | Wheat-Rye-6R.300k_Assembly_Contig_120_1 | 1187 | 2741 |
| RFL 298 | Anapurna.300k_Assembly_Contig_110_1 | 1188 | 2742 |
| RFL 298 | R197.300k_Assembly_Contig_124_1 | 1189 | 2743 |
| RFL 298 | R0932E.300k_Assembly_Contig_124_1 | 1190 | 2744 |
| RFL 298 | Primepii.300k_Assembly_Contig_124_1 | 1191 | 2745 |
| RFL 298 | R0934F.300k_Assembly_Contig_127_1 | 1192 | 2746 |
| RFL 299 | R197.300k_Assembly_Contig_195_2 | 1193 | 2747 |
| RFL 299 | R0934F.300k_Assembly_Contig_192_1 | 1194 | 2748 |
| RFL 299 | Wheat-Rye-6R.300k_Assembly_Contig_192_1 | 1195 | 2749 |
| RFL 300 | Wheat-Rye-6R.300k_Assembly_Contig_111_2 | 1196 | 2750 |
| RFL 300 | R197.300k_Assembly_Contig_121_2 | 1197 | 2751 |
| RFL 300 | Primepii.300k_Assembly_Contig_113_2 | 1198 | 2752 |
| RFL 301 | Anapurna.300k_Assembly_Contig_69_3 | 1199 | 2753 |
| RFL 301 | Primepii.300k_Assembly_Contig_61_3 | 1200 | 2754 |
| RFL 301 | R197.300k_Assembly_Contig_48_3 | 1201 | 2755 |
| RFL 301 | R0934F.300k_Assembly_Contig_65_3 | 1202 | 2756 |
| RFL 301 | Wheat-Rye-6R.300k_Assembly_Contig_64_3 | 1203 | 2757 |
| RFL 301 | R0932E.300k_Assembly_Contig_70_3 | 1204 | 2758 |
| RFL 302 | Triticum- | 1205 | 2759 |
| | timopheevii.300k_Assembly_Contig_24_2 | | |
| RFL 303 | Wheat-Rye-6R.300k_Assembly_Contig_199_1 | 1206 | 2760 |
| RFL 303 | Anapurna.300k_Assembly_Contig_195_1 | 1207 | 2761 |
| RFL 304 | Anapurna.300k_Assembly_Contig_120_2 | 1208 | 2762 |
| RFL 304 | R0932E.300k_Assembly_Contig_129_2 | 1209 | 2763 |
| RFL 304 | Primepii.300k_Assembly_Contig_129_2 | 1210 | 2764 |
| RFL 304 | R197.300k_Assembly_Contig_145_2 | 1211 | 2765 |
| RFL 304 | Wheat-Rye-6R.300k_Assembly_Contig_129_2 | 1212 | 2766 |
| RFL 304 | R0934F.300k_Assembly_Contig_121_2 | 1213 | 2767 |
| RFL 305 | Wheat-Rye-6R.300k_Assembly_Contig_135_1 | 1214 | 2768 |
| RFL 306 | R197.300k_Assembly_Contig_107_2 | 1215 | 2769 |
| RFL 306 | R0934F.300k_Assembly_Contig_88_2 | 1216 | 2770 |
| RFL 306 | Anapurna.300k_Assembly_Contig_76_2 | 1217 | 2771 |
| RFL 306 | Primepii.300k_Assembly_Contig_74_2 | 1218 | 2772 |
| RFL 306 | R0932E.300k_Assembly_Contig_115_2 | 1219 | 2773 |
| RFL 306 | Wheat-Rye-6R.300k_Assembly_Contig_81_2 | 1220 | 2774 |
| RFL 307 | Triticum- | 1221 | 2775 |
| | timopheevii.300k_Assembly_Contig_104_1 | | |
| RFL 308 | R197.300k_Assembly_Contig_198_1 | 1222 | 2776 |
| RFL 308 | R0932E.300k_Assembly_Contig_178_2 | 1223 | 2777 |
| RFL 308 | Wheat-Rye-6R.300k_Assembly_Contig_193_1 | 1224 | 2778 |
| RFL 308 | Anapurna.300k_Assembly_Contig_183_1 | 1225 | 2779 |
| RFL 308 | R0934F.300k_Assembly_Contig_175_1 | 1226 | 2780 |
| RFL 308 | Primepii.300k_Assembly_Contig_198_1 | 1227 | 2781 |
| RFL 309 | Wheat-Rye-6R.300k_Assembly_Contig_52_2 | 1228 | 2782 |
| RFL 309 | Primepii.300k_Assembly_Contig_194_1 | 1229 | 2783 |
| RFL 309 | R0932E.300k_Assembly_Contig_51_1 | 1230 | 2784 |
| RFL 309 | R0934F.300k_Assembly_Contig_191_2 | 1231 | 2785 |
| RFL 309 | R197.300k_Assembly_Contig_190_2 | 1232 | 2786 |
| RFL 310 | Triticum- | 1233 | 2787 |
| | timopheevii.300k_Assembly_Contig_19_1 | | |
| RFL 311 | Wheat-Rye-6R.300k_Assembly_Contig_123_1 | 1234 | 2788 |
| RFL 311 | Anapurna.300k_Assembly_Contig_118_1 | 1235 | 2789 |
| RFL 311 | R197.300k_Assembly_Contig_131_1 | 1236 | 2790 |
| RFL 311 | R0932E.300k_Assembly_Contig_128_1 | 1237 | 2791 |
| RFL 312 | Anapurna.300k_Assembly_Contig_146_1 | 1238 | 2792 |
| RFL 312 | R0932E.300k_Assembly_Contig_175_1 | 1239 | 2793 |
| RFL 312 | Wheat-Rye-6R.300k_Assembly_Contig_158_1 | 1240 | 2794 |
| RFL 312 | R197.300k_Assembly_Contig_155_1 | 1241 | 2795 |
| RFL 312 | R0934F.300k_Assembly_Contig_153_1 | 1242 | 2796 |
| RFL 312 | Primepii.300k_Assembly_Contig_145_1 | 1243 | 2797 |
| RFL 313 | R0934F.300k_Assembly_Contig_59_1 | 1244 | 2798 |
| RFL 313 | R0932E.300k_Assembly_Contig_69_1 | 1245 | 2799 |
| RFL 313 | Wheat-Rye-6R.300k_Assembly_Contig_47_1 | 1246 | 2800 |
| RFL 313 | Primepii.300k_Assembly_Contig_69_1 | 1247 | 2801 |
| RFL 313 | Anapurna.300k_Assembly_Contig_56_1 | 1248 | 2802 |
| RFL 313 | R197.300k_Assembly_Contig_91_1 | 1249 | 2803 |
| RFL 314 | Anapurna.300k_Assembly_Contig_143_2 | 1250 | 2804 |
| RFL 314 | R197.300k_Assembly_Contig_169_2 | 1251 | 2805 |
| RFL 314 | R0932E.300k_Assembly_Contig_150_2 | 1252 | 2806 |
| RFL 314 | Wheat-Rye-6R.300k_Assembly_Contig_148_2 | 1253 | 2807 |
| RFL 314 | Primepii.300k_Assembly_Contig_147_2 | 1254 | 2808 |
| RFL 314 | R0934F.300k_Assembly_Contig_148_2 | 1255 | 2809 |
| RFL 315 | R197.300k_Assembly_Contig_129_2 | 1256 | 2810 |
| RFL 315 | R0934F.300k_Assembly_Contig_120_2 | 1257 | 2811 |
| RFL 315 | Wheat-Rye-6R.300k_Assembly_Contig_118_2 | 1258 | 2812 |
| RFL 315 | Primepii.300k_Assembly_Contig_123_2 | 1259 | 2813 |
| RFL 315 | Anapurna.300k_Assembly_Contig_102_2 | 1260 | 2814 |
| RFL 315 | Triticum- | 1261 | 2815 |
| | timopheevii.300k_Assembly_Contig_79_2 | | |
| RFL 315 | R0932E.300k_Assembly_Contig_127_2 | 1262 | 2816 |
| RFL 316 | R197.300k_Assembly_Contig_208_2 | 1263 | 2817 |
| RFL 317 | R197.300k_Assembly_Contig_9_2 | 1264 | 2818 |
| RFL 317 | Anapurna.300k_Assembly_Contig_18_2 | 1265 | 2819 |
| RFL 317 | Primepii.300k_Assembly_Contig_5_2 | 1266 | 2820 |
| RFL 317 | R0934F.300k_Assembly_Contig_19_2 | 1267 | 2821 |
| RFL 317 | Wheat-Rye-6R.300k_Assembly_Contig_14_2 | 1268 | 2822 |
| RFL 317 | R0932E.300k_Assembly_Contig_16_2 | 1269 | 2823 |
| RFL 318 | Anapurna.300k_Assembly_Contig_57_1 | 1270 | 2824 |
| RFL 319 | Primepii.300k_Assembly_Contig_117_1 | 1271 | 2825 |
| RFL 319 | R0934F.300k_Assembly_Contig_123_1 | 1272 | 2826 |
| RFL 320 | R0932E.300k_Assembly_Contig_105_2 | 1273 | 2827 |
| RFL 320 | Wheat-Rye-6R.300k_Assembly_Contig_110_2 | 1274 | 2828 |
| RFL 320 | Anapurna.300k_Assembly_Contig_91_2 | 1275 | 2829 |
| RFL 320 | R197.300k_Assembly_Contig_87_2 | 1276 | 2830 |
| RFL 320 | R0934F.300k_Assembly_Contig_101_2 | 1277 | 2831 |
| RFL 320 | Primepii.300k_Assembly_Contig_98_2 | 1278 | 2832 |
| RFL 321 | R0934F.300k_Assembly_Contig_105_2 | 1279 | 2833 |
| RFL 321 | R0932E.300k_Assembly_Contig_84_2 | 1280 | 2834 |
| RFL 321 | Wheat-Rye-6R.300k_Assembly_Contig_89_2 | 1281 | 2835 |
| RFL 321 | R197.300k_Assembly_Contig_89_2 | 1282 | 2836 |
| RFL 321 | Primepii.300k_Assembly_Contig_78_2 | 1283 | 2837 |
| RFL 321 | Anapurna.300k_Assembly_Contig_65_2 | 1284 | 2838 |
| RFL 322 | R0934F.300k_Assembly_Contig_47_1 | 1285 | 2839 |
| RFL 322 | Primepii.300k_Assembly_Contig_15_1 | 1286 | 2840 |
| RFL 323 | R0932E.300k_Assembly_Contig_21_1 | 1287 | 2841 |
| RFL 323 | R0934F.300k_Assembly_Contig_25_1 | 1288 | 2842 |
| RFL 323 | R197.300k_Assembly_Contig_14_1 | 1289 | 2843 |
| RFL 323 | Anapurna.300k_Assembly_Contig_6_1 | 1290 | 2844 |
| RFL 323 | Primepii.300k_Assembly_Contig_20_1 | 1291 | 2845 |
| RFL 323 | Wheat-Rye-6R.300k_Assembly_Contig_8_1 | 1292 | 2846 |
| RFL 324 | Anapurna.300k_Assembly_Contig_178_1 | 1293 | 2847 |
| RFL 324 | Triticum- | 1294 | 2848 |
| | timopheevii.300k_Assembly_Contig_116_1 | | |
| RFL 324 | R197.300k_Assembly_Contig_193_1 | 1295 | 2849 |
| RFL 324 | R0932E.300k_Assembly_Contig_191_1 | 1296 | 2850 |
| RFL 324 | Wheat-Rye-6R.300k_Assembly_Contig_184_1 | 1297 | 2851 |
| RFL 324 | Primepii.300k_Assembly_Contig_186_1 | 1298 | 2852 |
| RFL 324 | R0934F.300k_Assembly_Contig_188_1 | 1299 | 2853 |
| RFL 325 | Primepii.300k_Assembly_Contig_74_1 | 1300 | 2854 |
| RFL 325 | R197.300k_Assembly_Contig_107_1 | 1301 | 2855 |
| RFL 325 | Wheat-Rye-6R.300k_Assembly_Contig_81_1 | 1302 | 2856 |
| RFL 325 | R0934F.300k_Assembly_Contig_88_1 | 1303 | 2857 |
| RFL 325 | R0932E.300k_Assembly_Contig_115_1 | 1304 | 2858 |
| RFL 325 | Anapurna.300k_Assembly_Contig_76_1 | 1305 | 2859 |
| RFL 326 | R0932E.300k_Assembly_Contig_77_1 | 1306 | 2860 |
| RFL 326 | Wheat-Rye-6R.300k_Assembly_Contig_75_1 | 1307 | 2861 |
| RFL 326 | R197.300k_Assembly_Contig_103_1 | 1308 | 2862 |
| RFL 326 | R0934F.300k_Assembly_Contig_72_1 | 1309 | 2863 |
| RFL 327 | Primepii.300k_Assembly_Contig_192_1 | 1310 | 2864 |
| RFL 327 | R197.300k_Assembly_Contig_1921 | 1311 | 2865 |
| RFL 327 | Wheat-Rye-6R.300k_Assembly_Contig_187_1 | 1312 | 2866 |
| RFL 327 | R0932E.300k_Assembly_Contig_190_1 | 1313 | 2867 |
| RFL 327 | R0934F.300k_Assembly_Contig_185_1 | 1314 | 2868 |
| RFL 327 | Anapurna.300k_Assembly_Contig_182_1 | 1315 | 2869 |
| RFL 328 | Primepii.300k_Assembly_Contig_95_1 | 1316 | 2870 |
| RFL 328 | R197.300k_Assembly_Contig_112_1 | 1317 | 2871 |
| RFL 328 | Wheat-Rye-6R.300k_Assembly_Contig_173_1 | 1318 | 2872 |
| RFL 329 | Triticum- | 1319 | 2873 |
| | timopheevii.300k_Assembly_Contig_88_2 | | |
| RFL 329 | Wheat-Rye-6R.300k_Assembly_Contig_124_1 | 1320 | 2874 |
| RFL 329 | Anapurna.300k_Assembly_Contig_115_1 | 1321 | 2875 |
| RFL 329 | Primepii.300k_Assembly_Contig_122_1 | 1322 | 2876 |
| RFL 329 | R197.300k_Assembly_Contig_130_1 | 1323 | 2877 |
| RFL 329 | R0934F.300k_Assembly_Contig_114_1 | 1324 | 2878 |
| RFL 330 | Wheat-Rye-6R.300k_Assembly_Contig_141_2 | 1325 | 2879 |
| RFL 330 | R197.300k_Assembly_Contig_146_2 | 1326 | 2880 |
| RFL 330 | Primepii.300k_Assembly_Contig_155_1 | 1327 | 2881 |
| RFL 330 | Anapurna.300k_Assembly_Contig_138_2 | 1328 | 2882 |
| RFL 330 | Triticum- | 1329 | 2883 |
| | timopheevii.300k_Assembly_Contig_92_1 | | |
| RFL 330 | R0934F.300k_Assembly_Contig_142_2 | 1330 | 2884 |
| RFL 330 | R0932E.300k_Assembly_Contig_146_2 | 1331 | 2885 |
| RFL 331 | R0932E.300k_Assembly_Contig_26_1 | 1332 | 2886 |
| RFL 331 | R197.300k_Assembly_Contig_41_1 | 1333 | 2887 |
| RFL 331 | R0934F.300k_Assembly_Contig_38_1 | 1334 | 2888 |
| RFL 331 | Wheat-Rye-6R.300k_Assembly_Contig_50_1 | 1335 | 2889 |
| RFL 331 | Primepii.300k_Assembly_Contig_45_1 | 1336 | 2890 |
| RFL 331 | Anapurna.300k_Assembly_Contig_45_1 | 1337 | 2891 |
| RFL 332 | Triticum- | 1338 | 2892 |
| | timopheevii.300k_Assembly_Contig_72_1 | | |
| RFL 333 | R0934F.300k_Assembly_Contig_53_2 | 1339 | 2893 |
| RFL 333 | Primepii.300k_Assembly_Contig_28_2 | 1340 | 2894 |
| RFL 333 | Wheat-Rye-6R.300k_Assembly_Contig_49_2 | 1341 | 2895 |
| RFL 333 | R0932E.300k_Assembly_Contig_14_2 | 1342 | 2896 |
| RFL 333 | R197.300k_Assembly_Contig_53_2 | 1343 | 2897 |
| RFL 333 | Anapurna.300k_Assembly_Contig_55_2 | 1344 | 2898 |
| RFL 334 | R197.300k_Assembly_Contig_208_1 | 1345 | 2899 |
| RFL 335 | Wheat-Rye-6R.300k_Assembly_Contig_112_1 | 1346 | 2900 |
| RFL 335 | R0934F.300k_Assembly_Contig_130_1 | 1347 | 2901 |
| RFL 335 | R0932E.300k_Assembly_Contig_111_1 | 1348 | 2902 |
| RFL 335 | Anapurna.300k_Assembly_Contig_88_1 | 1349 | 2903 |
| RFL 335 | R0932E.300k_Assembly_Contig_206_1 | 1350 | 2904 |
| RFL 336 | Triticum- | 1351 | 2905 |
| | timopheevii.300k_Assembly_Contig_18_1 | | |
| RFL 337 | R197.300k_Assembly_Contig_184_1 | 1352 | 2906 |
| RFL 337 | Triticum- | 1353 | 2907 |
| | timopheevii.300k_Assembly_Contig_115_1 | | |
| RFL 337 | R0932E.300k_Assembly_Contig_188_1 | 1354 | 2908 |
| RFL 337 | Primepii.300k_Assembly_Contig_185_1 | 1355 | 2909 |
| RFL 337 | R0934F.300k_Assembly_Contig_186_1 | 1356 | 2910 |
| RFL 337 | Anapurna.300k_Assembly_Contig_173_1 | 1357 | 2911 |
| RFL 337 | Wheat-Rye-6R.300k_Assembly_Contig_182_1 | 1358 | 2912 |
| RFL 338 | Primepii.300k_Assembly_Contig_111_1 | 1359 | 2913 |
| RFL 339 | Anapurna.300k_Assembly_Contig_36_2 | 1360 | 2914 |
| RFL 339 | Wheat-Rye-6R.300k_Assembly_Contig_43_2 | 1361 | 2915 |
| RFL 339 | R0934F.300k_Assembly_Contig_35_2 | 1362 | 2916 |
| RFL 339 | R197.300k_Assembly_Contig_2_5 | 1363 | 2917 |
| RFL 339 | R0932E.300k_Assembly_Contig_49_2 | 1364 | 2918 |
| RFL 339 | Primepii.300k_Assembly_Contig_32_2 | 1365 | 2919 |
| RFL 340 | Triticum- | 1366 | 2920 |
| | timopheevii.300k_Assembly_Contig_91_1 | | |
| RFL 341 | R0932E.300k_Assembly_Contig_118_1 | 1367 | 2921 |
| RFL 341 | R197.300k_Assembly_Contig_104_1 | 1368 | 2922 |
| RFL 341 | Anapurna.300k_Assembly_Contig_97_1 | 1369 | 2923 |
| RFL 341 | Wheat-Rye-6R.300k_Assembly_Contig_94_1 | 1370 | 2924 |
| RFL 342 | Triticum- | 1371 | 2925 |
| | timopheevii.300k_Assembly_Contig_11_1 | | |
| RFL 343 | Primepii.300k_Assembly_Contig_179_1 | 1372 | 2926 |
| RFL 344 | Triticum- | 1373 | 2927 |
| | timopheevii.300k_Assembly_Contig_128_1 | | |
| RFL 345 | R0932E.300k_Assembly_Contig_120_1 | 1374 | 2928 |
| RFL 346 | Wheat-Rye-6R.300k_Assembly_Contig_142_1 | 1375 | 2929 |
| RFL 346 | R197.300k_Assembly_Contig_153_1 | 1376 | 2930 |
| RFL 346 | Primepii.300k_Assembly_Contig_158_1 | 1377 | 2931 |
| RFL 346 | Anapurna.300k_Assembly_Contig_154_1 | 1378 | 2932 |
| RFL 347 | Anapurna.300k_Assembly_Contig_9_2 | 1379 | 2933 |
| RFL 347 | R0932E.300k_Assembly_Contig_10_2 | 1380 | 2934 |
| RFL 347 | R0934F.300k_Assembly_Contig_21_2 | 1381 | 2935 |
| RFL 347 | Primepii.300k_Assembly_Contig_48_2 | 1382 | 2936 |
| RFL 347 | R197.300k_Assembly_Contig_2_2 | 1383 | 2937 |
| RFL 347 | Wheat-Rye-6R.300k_Assembly_Contig_20_2 | 1384 | 2938 |
| RFL 348 | Triticum- | 1385 | 2939 |
| | timopheevii.300k_Assembly_Contig_58_2 | | |
| RFL 349 | Primepii.300k_Assembly_Contig_45_2 | 1386 | 2940 |
| RFL 349 | R197.300k_Assembly_Contig_41_2 | 1387 | 2941 |
| RFL 349 | R0932E.300k_Assembly_Contig_26_2 | 1388 | 2942 |
| RFL 349 | R0934F.300k_Assembly_Contig_38_2 | 1389 | 2943 |
| RFL 349 | Anapurna.300k_Assembly_Contig_45_2 | 1390 | 2944 |
| RFL 349 | Wheat-Rye-6R.300k_Assembly_Contig_50_2 | 1391 | 2945 |
| RFL 350 | Anapurna.300k_Assembly_Contig_177_1 | 1392 | 2946 |
| RFL 350 | R0934F.300k_Assembly_Contig_184_1 | 1393 | 2947 |
| RFL 350 | R0932E.300k_Assembly_Contig_186_1 | 1394 | 2948 |
| RFL 350 | R197.300k_Assembly_Contig_187_1 | 1395 | 2949 |
| RFL 350 | Wheat-Rye-6R.300k_Assembly_Contig_181_1 | 1396 | 2950 |
| RFL 351 | R0934F.300k_Assembly_Contig_93_1 | 1397 | 2951 |
| RFL 351 | Primepii.300k_Assembly_Contig_88_1 | 1398 | 2952 |
| RFL 352 | Triticum- | 1399 | 2953 |
| | timopheevii.300k_Assembly_Contig_68_1 | | |
| RFL 353 | R197.300k_Assembly_Contig_138_2 | 1400 | 2954 |
| RFL 353 | Wheat-Rye-6R.300k_Assembly_Contig_122_2 | 1401 | 2955 |
| RFL 353 | Anapurna.300k_Assembly_Contig_119_2 | 1402 | 2956 |
| RFL 353 | Primepii.300k_Assembly_Contig_131_2 | 1403 | 2957 |
| RFL 353 | R0932E.300k_Assembly_Contig_131_2 | 1404 | 2958 |
| RFL 353 | R0934F.300k_Assembly_Contig_113_2 | 1405 | 2959 |
| RFL 354 | R0932E.300k_Assembly_Contig_106_1 | 1406 | 2960 |
| RFL 354 | Anapurna.300k_Assembly_Contig_81_1 | 1407 | 2961 |
| RFL 354 | R197.300k_Assembly_Contig_88_1 | 1408 | 2962 |
| RFL 354 | Wheat-Rye-6R.300k_Assembly_Contig_114_1 | 1409 | 2963 |
| RFL 354 | R0934F.300k_Assembly_Contig_112_1 | 1410 | 2964 |
| RFL 354 | Primepii.300k_Assembly_Contig_103_1 | 1411 | 2965 |
| RFL 355 | Anapurna.300k_Assembly_Contig_133_1 | 1412 | 2966 |
| RFL 356 | Triticum- | 1413 | 2967 |
| | timopheevii.300k_Assembly_Contig_91_2 | | |
| RFL 357 | Wheat-Rye-6R.300k_Assembly_Contig_56_1 | 1414 | 2968 |
| RFL 357 | Anapurna.300k_Assembly_Contig_60_2 | 1415 | 2969 |
| RFL 357 | Primepii.300k_Assembly_Contig_56_2 | 1416 | 2970 |
| RFL 357 | R0934F.300k_Assembly_Contig_60_1 | 1417 | 2971 |
| RFL 357 | R0932E.300k_Assembly_Contig_2_1 | 1418 | 2972 |
| RFL 357 | R197.300k_Assembly_Contig_60_1 | 1419 | 2973 |
| RFL 358 | R0934F.300k_Assembly_Contig_193_1 | 1420 | 2974 |
| RFL 358 | Wheat-Rye-6R.300k_Assembly_Contig_188_1 | 1421 | 2975 |
| RFL 358 | R197.300k_Assembly_Contig_197_1 | 1422 | 2976 |
| RFL 358 | Primepii.300k_Assembly_Contig_190_1 | 1423 | 2977 |
| RFL 358 | R0932E.300k_Assembly_Contig_194_1 | 1424 | 2978 |
| RFL 358 | Anapurna.300k_Assembly_Contig_184_1 | 1425 | 2979 |
| RFL 359 | Primepii.300k_Assembly_Contig_210_1 | 1426 | 2980 |
| RFL 359 | R0934F.300k_Assembly_Contig_208_1 | 1427 | 2981 |
| RFL 360 | Wheat-Rye-6R.300k_Assembly_Contig_153_1 | 1428 | 2982 |
| RFL 360 | R197.300k_Assembly_Contig_160_1 | 1429 | 2983 |
| RFL 361 | Wheat-Rye-6R.300k_Assembly_Contig_97_2 | 1430 | 2984 |
| RFL 361 | Primepii.300k_Assembly_Contig_91_2 | 1431 | 2985 |
| RFL 361 | R0932E.300k_Assembly_Contig_110_2 | 1432 | 2986 |
| RFL 361 | R0934F.300k_Assembly_Contig_86_2 | 1433 | 2987 |
| RFL 361 | Anapurna.300k_Assembly_Contig_101_2 | 1434 | 2988 |
| RFL 361 | R197.300k_Assembly_Contig_108_2 | 1435 | 2989 |
| RFL 362 | Triticum- | 1436 | 2990 |
| | timopheevii.300k_Assembly_Contig_61_1 | | |
| RFL 363 | R0932E.300k_Assembly_Contig_31_1 | 1437 | 2991 |
| RFL 363 | R197.300k_Assembly_Contig_49_1 | 1438 | 2992 |
| RFL 363 | R0934F.300k_Assembly_Contig_41_1 | 1439 | 2993 |
| RFL 363 | Anapurna.300k_Assembly_Contig_40_1 | 1440 | 2994 |
| RFL 363 | Wheat-Rye-6R.300k_Assembly_Contig_27_1 | 1441 | 2995 |
| RFL 363 | Primepii.300k_Assembly_Contig_65_1 | 1442 | 2996 |
| RFL 364 | Wheat-Rye-6R.300k_Assembly_Contig_141_3 | 1443 | 2997 |
| RFL 364 | R197.300k_Assembly_Contig_146_3 | 1444 | 2998 |
| RFL 364 | Triticum- | 1445 | 2999 |
| | timopheevii.300k_Assembly_Contig_92_2 | | |
| RFL 364 | Anapurna.300k_Assembly_Contig_138_3 | 1446 | 3000 |
| RFL 364 | R0934F.300k_Assembly_Contig_142_3 | 1447 | 3001 |
| RFL 364 | R0932E.300k_Assembly_Contig_146_3 | 1448 | 3002 |
| RFL 364 | Primepii.300k_Assembly_Contig_155_2 | 1449 | 3003 |
| RFL 365 | R0934F.300k_Assembly_Contig_5_3 | 1450 | 3004 |
| RFL 365 | Primepii.300k_Assembly_Contig_17_2 | 1451 | 3005 |
| RFL 365 | R197.300k_Assembly_Contig_5_2 | 1452 | 3006 |
| RFL 366 | Wheat-Rye-6R.300k_Assembly_Contig_144_1 | 1453 | 3007 |
| RFL 366 | Anapurna.300k_Assembly_Contig_148_1 | 1454 | 3008 |
| RFL 366 | Primepii.300k_Assembly_Contig_142_1 | 1455 | 3009 |
| RFL 366 | R0932E.300k_Assembly_Contig_147_1 | 1456 | 3010 |
| RFL 366 | R197.300k_Assembly_Contig_170_1 | 1457 | 3011 |
| RFL 366 | R0934F.300k_Assembly_Contig_168_1 | 1458 | 3012 |
| RFL 367 | R197.300k_Assembly_Contig_138_1 | 1459 | 3013 |
| RFL 367 | Wheat-Rye-6R.300k_Assembly_Contig_122_1 | 1460 | 3014 |
| RFL 367 | Anapurna.300k_Assembly_Contig_119_1 | 1461 | 3015 |
| RFL 367 | R0932E.300k_Assembly_Contig_131_1 | 1462 | 3016 |
| RFL 367 | Primepii.300k_Assembly_Contig_131_1 | 1463 | 3017 |
| RFL 367 | R0934F.300k_Assembly_Contig_113_1 | 1464 | 3018 |
| RFL 368 | R0932E.300k_Assembly_Contig_63_2 | 1465 | 3019 |
| RFL 368 | R197.300k_Assembly_Contig_35_2 | 1466 | 3020 |
| RFL 368 | Anapurna.300k_Assembly_Contig_170_2 | 1467 | 3021 |
| RFL 368 | Wheat-Rye-6R.300k_Assembly_Contig_61_2 | 1468 | 3022 |
| RFL 369 | Anapurna.300k_Assembly_Contig_159_1 | 1469 | 3023 |
| RFL 369 | R0932E.300k_Assembly_Contig_162_1 | 1470 | 3024 |
| RFL 369 | R197.300k_Assembly_Contig_165_1 | 1471 | 3025 |
| RFL 369 | Wheat-Rye-6R.300k_Assembly_Contig_138_1 | 1472 | 3026 |
| RFL 369 | R0934F.300k_Assembly_Contig_164_1 | 1473 | 3027 |
| RFL 369 | Primepii.300k_Assembly_Contig_168_1 | 1474 | 3028 |
| RFL 370 | R0932E.300k_Assembly_Contig_28_1 | 1475 | 3029 |
| RFL 370 | Primepii.300k_Assembly_Contig_26_1 | 1476 | 3030 |
| RFL 370 | Anapurna.300k_Assembly_Contig_7_1 | 1477 | 3031 |
| RFL 371 | Anapurna.300k_Assembly_Contig_117_1 | 1478 | 3032 |
| RFL 371 | R0932E.300k_Assembly_Contig_154_1 | 1479 | 3033 |
| RFL 371 | Primepii.300k_Assembly_Contig_134_1 | 1480 | 3034 |
| RFL 372 | R0932E.300k_Assembly_Contig_131_3 | 1481 | 3035 |
| RFL 372 | R0934F.300k_Assembly_Contig_113_3 | 1482 | 3036 |
| RFL 373 | Primepii.300k_Assembly_Contig_211_1 | 1483 | 3037 |
| RFL 373 | R197.300k_Assembly_Contig_206_1 | 1484 | 3038 |
| RFL 373 | R0934F.300k_Assembly_Contig_205_1 | 1485 | 3039 |
| RFL 374 | Triticum- | 1486 | 3040 |
| | timopheevii.300k_Assembly_Contig_103_2 | | |
| RFL 375 | R0932E.300k_Assembly_Contig_42_2 | 1487 | 3041 |
| RFL 375 | Anapurna.300k_Assembly_Contig_46_2 | 1488 | 3042 |
| RFL 375 | R197.300k_Assembly_Contig_147_2 | 1489 | 3043 |
| RFL 375 | Wheat-Rye-6R.300k_Assembly_Contig_18_2 | 1490 | 3044 |
| RFL 376 | R0932E.300k_Assembly_Contig_119_3 | 1491 | 3045 |
| RFL 376 | R197.300k_Assembly_Contig_122_3 | 1492 | 3046 |
| RFL 376 | R0934F.300k_Assembly_Contig_108_3 | 1493 | 3047 |
| RFL 376 | Wheat-Rye-6R.300k_Assembly_Contig_116_3 | 1494 | 3048 |
| RFL 376 | Anapurna.300k_Assembly_Contig_103_3 | 1495 | 3049 |
| RFL 376 | Primepii.300k_Assembly_Contig_101_3 | 1496 | 3050 |
| RFL 377 | R0932E.300k_Assembly_Contig_74_2 | 1497 | 3051 |
| RFL 378 | R197.300k_Assembly_Contig_202_1 | 1498 | 3052 |
| RFL 378 | R0932E.300k_Assembly_Contig_197_1 | 1499 | 3053 |
| RFL 378 | Wheat-Rye-6R.300k_Assembly_Contig_196_1 | 1500 | 3054 |
| RFL 378 | Anapurna.300k_Assembly_Contig_187_1 | 1501 | 3055 |
| RFL 378 | R0934F.300k_Assembly_Contig_199_1 | 1502 | 3056 |
| RFL 378 | Primepii.300k_Assembly_Contig_205_1 | 1503 | 3057 |
| RFL 379 | Primepii.300k_Assembly_Contig_223_1 | 1504 | 3058 |
| RFL 379 | Wheat-Rye-6R.300k_Assembly_Contig_179_1 | 1505 | 3059 |
| RFL 379 | Anapurna.300k_Assembly_Contig_193_1 | 1506 | 3060 |
| RFL 379 | R0932E.300k_Assembly_Contig_178_1 | 1507 | 3061 |
| RFL 380 | Triticum- | 1508 | 3062 |
| | timopheevii.300k_Assembly_Contig_85_1 | | |
| RFL 381 | R197.300k_Assembly_Contig_169_1 | 1509 | 3063 |
| RFL 381 | Wheat-Rye-6R.300k_Assembly_Contig_148_1 | 1510 | 3064 |
| RFL 381 | R0932E.300k_Assembly_Contig_150_1 | 1511 | 3065 |
| RFL 381 | Primepii.300k_Assembly_Contig_147_1 | 1512 | 3066 |
| RFL 381 | R0934F.300k_Assembly_Contig_148_1 | 1513 | 3067 |
| RFL 381 | Anapurna.300k_Assembly_Contig_143_1 | 1514 | 3068 |
| RFL 382 | Triticum- | 1515 | 3069 |
| | timopheevii.300k_Assembly_Contig_109_1 | | |
| RFL 383 | Wheat-Rye-6R.300k_Assembly_Contig_111_1 | 1516 | 3070 |
| RFL 383 | R197.300k_Assembly_Contig_121_1 | 1517 | 3071 |
| RFL 383 | Primepii.300k_Assembly_Contig_113_1 | 1518 | 3072 |
| RFL 384 | Triticum- | 1519 | 3073 |
| | timopheevii.300k_Assembly_Contig_117_1 | | |
| RFL 385 | Anapurna.300k_Assembly_Contig_167_1 | 1520 | 3074 |
| RFL 385 | R0932E.300k_Assembly_Contig_182_1 | 1521 | 3075 |
| RFL 385 | Wheat-Rye-6R.300k_Assembly_Contig_175_1 | 1522 | 3076 |
| RFL 385 | R0934F.300k_Assembly_Contig_172_1 | 1523 | 3077 |
| RFL 385 | Primepii.300k_Assembly_Contig_170_1 | 1524 | 3078 |
| RFL 385 | R197.300k_Assembly_Contig_175_1 | 1525 | 3079 |
| RFL 386 | Primepii.300k_Assembly_Contig_105_1 | 1526 | 3080 |
| RFL 386 | R0934F.300k_Assembly_Contig_56_1 | 1527 | 3081 |
| RFL 387 | Primepii.300k_Assembly_Contig_159_2 | 1528 | 3082 |
| RFL 388 | Wheat-Rye-6R.300k_Assembly_Contig_175_2 | 1529 | 3083 |
| RFL 388 | Anapurna.300k_Assembly_Contig_167_2 | 1530 | 3084 |
| RFL 388 | R0934F.300k_Assembly_Contig_172_2 | 1531 | 3085 |
| RFL 388 | Primepii.300k_Assembly_Contig_170_2 | 1532 | 3086 |
| RFL 388 | R0932E.300k_Assembly_Contig_182_2 | 1533 | 3087 |
| RFL 388 | R197.300k_Assembly_Contig_175_2 | 1534 | 3088 |
| RFL 389 | R0934F.300k_Assembly_Contig_74_1 | 1535 | 3089 |
| RFL 389 | Anapurna.300k_Assembly_Contig_64_1 | 1536 | 3090 |
| RFL 389 | Wheat-Rye-6R.300k_Assembly_Contig_70_1 | 1537 | 3091 |
| RFL 389 | Primepii.300k_Assembly_Contig_79_1 | 1538 | 3092 |
| RFL 390 | Wheat-Rye-6R.300k_Assembly_Contig_217_1 | 1539 | 3093 |
| RFL 390 | Anapurna.300k_Assembly_Contig_203_1 | 1540 | 3094 |
| RFL 391 | R197.300k_Assembly_Contig_159_2 | 1541 | 3095 |
| RFL 391 | Wheat-Rye-6R.300k_Assembly_Contig_146_2 | 1542 | 3096 |
| RFL 391 | Primepii.300k_Assembly_Contig_154_2 | 1543 | 3097 |
| RFL 391 | R0934F.300k_Assembly_Contig_144_2 | 1544 | 3098 |
| RFL 391 | Anapurna.300k_Assembly_Contig_152_2 | 1545 | 3099 |
| RFL 391 | R0932E.300k_Assembly_Contig_149_2 | 1546 | 3100 |
| RFL 392 | R0934F.300k_Assembly_Contig_118_2 | 1547 | 3101 |
| RFL 392 | Triticum- | 1548 | 3102 |
| | timopheevii.300k_Assembly_Contig_82_2 | | |
| RFL 393 | Primepii.300k_Assembly_Contig_115_3 | 1549 | 3103 |
| RFL 393 | Wheat-Rye-6R.300k_Assembly_Contig_108_3 | 1550 | 3104 |
| RFL 394 | R0934F.300k_Assembly_Contig_222_1 | 1551 | 3105 |
| RFL 395 | Primepii.300k_Assembly_Contig_159_1 | 1552 | 3106 |
| RFL 396 | Triticum- | 1553 | 3107 |
| | timopheevii.300k_Assembly_Contig_58_1 | | |
| RFL 397 | Triticum- | 1554 | 3133 |
| | timopheevii.300k_Assembly_Contig_46_2 | | |

### Example 3: Mapping of the Genes Encoding Candidate Rf Proteins in the Chromosomal Intervals Associated with Fertility Restoration

[0349] A. Fine-Mapping of the Genomic Region Containing Rf1 Genetic Determinants

[0350] Three F2 mapping populations segregating for Rf1 (R197xKalahari, R204xAlixan and R0932ExAltigo) encompassing 210, 218 and 212 individuals respectively were phenotyped and genotyped with 18100 SNP markers using Limagrain's internal genotyping platform.

[0351] Fertility tests were conducted indoors under controlled growth conditions, either in growth chambers or in greenhouses, enabling normal fertility of the tested wheat plants. The fertility scores indicated have been calculated by dividing the total number of seeds threshed from a spike by the number of counted spikelets. The t-tests conducted were done by comparing the fertility scores of F1s made with a restorer and the fertility scores of a panel of elite inbred lines grown under the same conditions.

[0352] Rf1 was first mapped on the short arm of the chromosome 1A between 4 cM and 10.9 cM on Limagrain's internal consensus map and physically delimited by SNP markers cfn1087371 and cfn0530841. These two SNP markers delimit the largest possible interval defined by the three mapping populations.

[0353] Subsequently, joint analysis of the three mapping populations and phenotyping of the individual F2 recombinant plants on derived F3 families validated the QTL position and delimited the Rf1 interval between 7 cM and 8.9 cM on Limagrain's internal consensus map and physically delimited by SNP markers cfn1082074 and cfn0523990. We used the genomic resources of the IWGSC Whole genome assembly, ‘IWGSC WGA’ (available from June 2016 from the URGI IWGSC repository) to anchor the locus to the wheat genome reference physical map. The left border (cfn1082074) was anchored on the IWGSCWGAVO2_1AS_scaffold44309 scaffold and the right border (cfn0523990) was anchored on the IWGSCWGAV02_1AS_scaffold47238 scaffold.

[0354] Next, the locus was fine-mapped by screening 2976 and 3072 F3 lines from R197xKalahari and R204xAlixan derived from F2 plants heterozygous at the locus. Phenotyping and analysis of recombinant plant progenies within the interval redefined a smaller mapping interval between 7.5 and 8.8 cM delimited by cfn0522096 and cfn0527067 SNP markers on the IWGSCWGAV02_1AS_scaffold44309 scaffold and the IWGSCWGAV02_1AS_scaffold47238 scaffold, respectively.

[0355] B. Fine-Mapping of the Genomic Region Containing Rf3 Genetic Determinants

[0356] Three F2 mapping populations (TJB155xAnapurna, 2852xAltamira, and AH46xR0946E) encompassing 217, 135, and 246 individuals respectively and a doubled-haploid (DH) population (H46xR934F) consisting of 140 individual plants segregating for Rf3 were phenotyped as described in example 1, and genotyped with 18100 SNP markers using Limagrain's internal genotyping platform. Rf3 was first mapped on the short arm of the chromosome 1B between 18.9 cM and 24.2 cM on Limagrain's internal consensus map and physically delimited by SNP markers cfn0554333 and cfn0560679. These two SNP markers delimit the largest possible interval defined by the four mapping populations.

[0357] Subsequently, joint analysis of the four mapping populations and validation of the phenotype of the individual F2/DH recombinant plants on derived F3 families validated the QTL, genetically delimited the locus between 22.2 cM and 22.7 cM on Limagrain's internal consensus map, and physically delimited the Rf3 interval between SNP markers cfn0436720 and cfn0238384. We used the genomic resources of the IWGSC Whole genome assembly, ‘IWGSC WGA’ (available from June 2016 from the URGI IWGSC repository) to anchor the locus to the physical map. The left border (cfn0436720) was anchored on the IWGSCWGAV02_1BS_scaffold35219 scaffold and the right border (cfn0238384) was anchored on the IWGSCWGAV02_1BS_scaffold5117 scaffold.

[0358] Next, the locus was fine-mapped by screening 2496 and 672 plants from TJB155xAnapurna and AH46xR0946E F2 plants heterozygous at the locus. Analysis of recombinant F3 plant progenies within the interval redefined a smaller mapping interval between 22.5 and 22.7 cM delimited by cfn1249269 and BS00090770 SNP markers on the IWGSCWGAV02_1BS_scaffold35219 scaffold and the IWGSCWGAV02_1BS_scaffold5117 scaffold, respectively.

[0359] C. Mapping of the Genomic Region Containing Rf7 Genetic Determinants

[0360] We crossed R197 and Primepii and then derived a population of 176 plants from individuals that were rf1 and rf3, i.e. not carrying the restorer alleles at the loci Rf1 and Rf3. The plants were genotyped with 18100 SNP markers using Limagrain's internal genotyping platform and phenotyped as described in example 1. We mapped the Rf7 locus on chromosome 7BL. Moreover, internal genotyping data showing a strong genetic divergence suggests the presence of an exotic chromosomal fragment which is stably transmitted through generations. We identified a large QTL ranging from 45 cM to 88 cM on chromosome 7B on Limagrain's internal consensus map with a peak on 46.7 cM (cfn0919993 with LOD score of 3.37E-40). Initial analysis of the recombinant plants suggests the Rf7 gene could be located between cfn3407185 and W90K_RAC875_c33564_120 markers delimiting a mapping interval of 0.3 cM between 46.7 cM and 47 cM on Limagrain's internal consensus map.

### Example 4: Identification of Candidate Orthologous RFL Groups

[0361] For each of the 282 RFL groups identified in example 2, the captured RFL ORFs (in the following referred to as protein sequences) were identified and the total number of RFL protein sequences is reported for each accession (Table 7, Table 8).

[0362] Only the following RFL clusters will be taken into consideration:
[0363] 1. RFL cluster contains protein representatives for all seven accessions and the sequences show polymorphism and/or length differences.
[0364] 2. RFL cluster contains representatives for only these accessions for which genetic characterization indicated that they may contain the same Rf gene or genes.

[0365] Tables 8A, 9A, 10 and 11 show the lists of the orthologous RFL groups correlating respectively with Rf1, Rf3, Rf7 and Rf-Rye-6R genes after the first screen. T. timopheevii is known to be fertile and, as a consequence, to restore T-CMS. This line is added here as it could contain any of the target Rf1, Rf3, Rf7 or Rf-rye genes.

[0366] Finally, only the orthologous RFL groups mapping in the chromosomal interval in wheat Triticum aestivum Chinese Spring reference genome are considered as candidates for further analyses. These orthologous RFL groups will be selected as “candidate Rf groups”.

[0367] Mapping was achieved using the tool tblastn from the BLAST+ Suite (https://blast.ncbi.nlm.nih.gov/Blast.cgi?PAGE_TYPE=BlastDocs&DOC_TYPE=Download). Specific parameters (-evalue 1e-25 -best_hit_score_edge 0.05 -best_hit_overhang 0.25) were used in order to keep all best hits.

[0368] A. Results for Rf1 Accessions:

[0369] Table 8A shows the orthologous RFL groups comprising at least one sequence captured from an accession characterized as bearing the Rf1 gene (R197, R0932E and T. timopheevii). The mapping described in example 3 allows us to discard orthologous RFL groups mapped outside of the chromosomal interval genetically associated with Rf1 fertility on the short arm of chromosome 1A. In this way, four RFLs clusters (79, 104, 185 and 268) were identified as potentially corresponding to the Rf protein encoded by the Rf1 gene.

[0370] All protein sequences from group RFL185 contain ˜500 amino acids and only 8.5 PPR motifs. Typically, full-length functional RFL proteins are expected to contain 15-20 PPR motifs. In addition, the last PPR motif of RFL185 is composed of only 15 amino acids. This indicates that RFL185 is truncated. RFL268 is also truncated (382 amino acids). Detailed sequence analysis has shown that RFL185 and RFL268 are remnants of the same gene that was split by a frameshift. Thus, both proteins are unlikely to be functional.

[0371] Hence RFL79 and RFL104 are considered as being the best candidate Rf groups for Rf1.

TABLE 8A
Selection of RFL based on accession CMS information for Rf1.

| | | | | | | | | Mapping |
|---|---|---|---|---|---|---|---|---|
| | | | | | | Restorer from Rye | Restorer | Positionned |
| CMS genotype | MAINTAINER | Rf3 | Rf1 + Rf7 | Rf1 | Rf3 | introgression | Triticum | in Rf1 mapping |
| RFLGene | ANAPURNA | PRIMEPII | R197 | R0932E | R0934F | Wheat-Rye-6R | timopheevii | interval |
| RFL1 | 0 | 0 | 1 | 1 | 0 | 0 | 0 | NO |
| RFL56 | 0 | 0 | 1 | 1 | 0 | 0 | 1 | NO |
| RFL59 | 0 | 0 | 1 | 2 | 0 | 0 | 1 | NO |
| RFL73 | 0 | 0 | 1 | 1 | 0 | 0 | 1 | NO |
| RFL74 | 0 | 0 | 3 | 4 | 3 | 0 | 0 | NO |
| RFL79 | 0 | 0 | 1 | 1 | 1 | 0 | 1 | YES |
| RFL93 | 0 | 0 | 1 | 1 | 0 | 0 | 0 | NO |
| RFL104 | 0 | 0 | 1 | 1 | 1 | 0 | 1 | YES |
| RFL129 | 0 | 0 | 1 | 1 | 1 | 0 | 0 | NO |
| RFL185 | 0 | 0 | 1 | 1 | 1 | 0 | 1 | YES |
| RFL268 | 0 | 0 | 1 | 1 | 1 | 0 | 1 | YES |

[0372] It can be noted from Table 8A that the only accession lacking Rf1 containing sequences in these candidate Rf groups is the accession R0934F.

TABLE 8B
presents the proteins in the candidate Rf groups 79 and 104.

| RFL | Cluster | | |
|---|---|---|---|
| 79 | 79 | length | ORF name |
| 0 | 0 | 808aa | R197.300k_Assembly_Contig_120_1 |
| 1 | 1 | 808aa | R0932E.300k_Assembly_Contig_103_1 |
| 2 | 2 | 808aa | R0934F.300k_Assembly_Contig_80_1 |
| 3 | 3 | 808aa | Triticum- |
| | | | timopheevii.300k_Assembly_Contig_57_1 |
| RFL | Cluster | | |
| 104 | 104 | length | ORF name |
| 0 | 0 | 757aa | R197.300k_Assembly_Contig_72_1 |
| 1 | 1 | 757aa | R0932E.300k_Assembly_Contig_82_1 |
| 2 | 2 | 757aa | R0934F.300k_Assembly_Contig_69_1 |
| 3 | 3 | 757aa | Triticum |
| | | | timopheevii.300k_Assembly_Contig_35_1 |

[0373] The DNA sequences derived from the contigs identified in example 2 and encoding RFL proteins from candidate Rf groups 79 and 104 were aligned with BWA-MEM software (Li H. and Durbin R., 2010). It was observed that these sequences differ in the 5′ UTR region in R0934F compared to R0932E and R197. One hypothesis is that the DNA sequences in R0934F were generated by a recombination event between the DNA sequences from candidate Rf groups 79 and 104. This recombined sequence may not be functional in R0934F as this line is only known to carry Rf3.

[0374] B. Results for Rf3 Accessions:

[0375] The same rationale as for the Rf1 accessions was applied to the accessions (Primepii and R0934F) characterized as carrying the Rf3 gene. Table 9A shows that orthologous RFL groups 67, 89, 140, 166 and 252 are candidate Rf groups for the Rf protein encoded by Rf3 as they contain proteins identified in Primepii and R0934, the two accessions characterized as carrying Rf3 restorer gene and are located in the mapped genetic interval on the short arm on chromosome 1B.

TABLE 9A
selection of RFL clusters based on germplasm CMS information for Rf3

| | | | | | | | | Mapping |
|---|---|---|---|---|---|---|---|---|
| | | | | | | Restorer from Rye | Restorer | Positionned |
| CMS genotype | MAINTAINER | Rf3 | Rf1 + Rf7 | Rf1 | Rf3 | introgression | Triticum | in Rf3 mapping |
| RFLGene | ANAPURNA | PRIMEPII | R197 | R0932E | R0934F | Wheat-Rye-6R | timopheevii | interval |
| RFL22 | 0 | 1 | 0 | 0 | 1 | 0 | 0 | NO |
| RFL67 | 0 | 4 | 0 | 0 | 3 | 0 | 0 | YES* |
| RFL89 | 0 | 2 | 0 | 0 | 1 | 0 | 0 | YES |
| RFL140 | 0 | 1 | 0 | 0 | 1 | 0 | 0 | YES |
| RFL142 | 0 | 1 | 0 | 0 | 1 | 0 | 0 | NO |
| RFL164 | 0 | 1 | 0 | 0 | 1 | 0 | 0 | NO |
| RFL166 | 0 | 1 | 0 | 0 | 1 | 0 | 0 | YES |
| RFL227 | 0 | 1 | 0 | 0 | 1 | 0 | 0 | NO |
| RFL252 | 0 | 1 | 0 | 0 | 1 | 0 | 0 | YES |

[0376] In order to achieve an exhaustive analysis for selection of Rf3 candidates, all 282 RFL clusters were carefully analyzed with regard to number of RFLs, their length and their origin in relation to Rf3 genotype information. RFL clusters composed of RFL sequences from multiple accessions were screened for full-length protein sequences originating only from Primepii and R0934F genotypes and partial/shorter sequences from the non-Rf3-carrying genotypes. This analysis allowed the identification of four additional Rf3-candidate RFL clusters: RFL28, RFL29, RFL60 and RFL170.

TABLE 9B
details of the proteins present in RFL cluster 28, 29, 60 and
170 including protein length (aa = amino acids) and name.

| | Cluster | | |
|---|---|---|---|
| RFL 28 | 28 | Rf3 | |
| 0 | 0 | 323aa | Anapurna.300k_Assembly_Contig_2_3 |
| 1 | 1 | 479aa | Anapurna.300k_Assembly_Contig_2_2 |
| 2 | 2 | 857aa | Primepii.300k_Assembly_Contig_13_1 |
| 3 | 3 | 323aa | R197.300k_Assembly_Contig_10_3 |
| 4 | 4 | 479aa | R197.300k_Assembly_Contig_10_2 |
| 5 | 5 | 479aa | R0932E.300k_Assembly_Contig_23_2 |
| 6 | 6 | 323aa | R0932E.300k_Assembly_Contig_23_3 |
| 7 | 7 | 857aa | R0934F.300k_Assembly_Contig_17_1 |
| 8 | 8 | 323aa | Wheat-Rye- |
| | | | 6R.300k_Assembly_Contig_7_3 |
| 9 | 9 | 479aa | Wheat-Rye- |
| | | | 6R.300k_Assembly_Contig_7_2 |
| | Cluster | | |
| RFL 29 | 29 | Rf3 | |
| 0 | 0 | 828aa | Primepii.300k_Assembly_Contig_67_1 |
| 1 | 1 | 828aa | R0934F.300k_Assembly_Contig_78_1 |
| 3 | 2 | 536aa | Wheat-Rye- |
| | | | 6R.300k_Assembly_Contig_77_2 |
| 4 | 3 | 295aa | Wheat-Rye- |
| | | | 6R.300k_Assembly_Contig_77_1 |
| | Cluster | | |
| RFL 60 | 60 | Rf3 | |
| 0 | 0 | 828aa | Primepii.300k_Assembly_Contig_94_1 |
| 1 | 1 | 287aa | R197.300k_Assembly_Contig_95_1 |
| 2 | 2 | 828aa | R0934F.300k_Assembly_Contig_73_2 |
| 4 | 3 | 809aa | Wheat-Rye- |
| | | | 6R.300k_Assembly_Contig_48_2 |

| | Cluster | | |
|---|---|---|---|
| RFL 170 | 170 | Rf3 | |
| 0 | 0 | 219aa | Anapurna.300k_Assembly_Contig_174_3 |
| 1 | 1 | 560aa | Primepii.300k_Assembly_Contig_60_2 |
| 2 | 2 | 369aa | R197.300k_Assembly_Contig_94_2 |
| 3 | 3 | 560aa | R0934F.300k_Assembly_Contig_67_2 |
| 4 | 4 | 369aa | Wheat-Rye- |
| | | | 6R.300k_Assembly_Contig_113_2 |

[0377] Table 9B shows that:

[0378] In candidate group RFL 28, the sequences from Rf3 genotypes (Primepii and R0934F) are 857 amino acids long whereas sequences from all other germplasms (non-Rf3) are truncated (sizes ranging from 323-479 amino acids) and thus are most probably nonfunctional.

[0379] In candidate group RFL 29, the sequences from Rf3 accessions (Primepii and R0934F) are 828 amino acids long whereas sequences from all other (non-Rf3) germplasms are truncated and thus most probably nonfunctional.

[0380] In candidate group RFL 60, the sequences in non-Rf3 genotypes (R197 and R0932E) are either absent (R0932E) or deemed nonfunctional due to their amino acid length (287 amino acids). The sequences from Rf3 genotypes Primepii and R0934F based on their sequence length appear to be full length and functional. In addition, our mapping analysis positioned RFL60 cluster within the Rf3 interval.

[0381] In cluster RFL 170, the sequences from Rf3 genotypes (Primepii and R0934F) are significantly larger (560 amino acids) than sequences from non Rf3 genotypes that appear truncated (below 370 amino acids) and are considered as being nonfunctional. Our detailed sequence analysis has shown that RFL170 is actually a second ORF, in addition to RFL 288, encoded by the same contig. Both ORFs originate from the same RFL gene in which contiguity was disrupted by a frameshift.

[0382] C. Rf7 and Rf-Rye Accessions:

[0383] The same rationale as for the analysis of Rf1 and Rf3 carrying accessions was applied to the accessions carrying the Rf7 restorer gene (R197 and T. timopheevii). The Rf7 gene was mapped on chromosome 7BL.

[0384] Table 10 shows that RFL 80, 128 and 191 are candidate Rf groups for the Rf protein encoded by the Rf7 gene as the proteins assigned to those clusters were found only in either R197 or T. timopheevii.

[0385] In regard to a restorer gene that originates from the introgression of rye chromosome 6R into wheat genome, clusters composed of single proteins originating from the Wheat-Rye-6R restorer line are considered as good candidates for a Rye-6R-specific restorer gene. Those criteria are true for the RFL 46, 87 and 208 orthologous groups listed in Table 6. Due to their high sequence divergence compared to Triticum sequences these genes are great candidates for restorer genes originating from rye.

TABLE 10
selection of RFL based on germplasm CMS information for Rf7

| | | | | | | | | Mapping |
|---|---|---|---|---|---|---|---|---|
| | | | | | | Restorer from Rye | Restorer | Positionned |
| CMS genotype | MAINTAINER | Rf3 | Rf1 + Rf7 | Rf1 | Rf3 | introgression | Triticum | in Rf7 mapping |
| RFLGene | ANAPURNA | PRIMEPII | R197 | R0932E | R0934F | Wheat-Rye-6R | timopheevii | interval |
| RFL49 | 0 | 0 | 2 | 0 | 0 | 0 | 2 | NO |
| RFL63 | 0 | 0 | 2 | 0 | 0 | 0 | 1 | NO |
| RFL80 | 0 | 0 | 1 | 0 | 0 | 0 | 0 | Not mapped |
| RFL85 | 0 | 0 | 2 | 0 | 0 | 0 | 1 | NO |
| RFL125 | 0 | 0 | 1 | 0 | 0 | 0 | 2 | NO |
| RFL128 | 0 | 0 | 1 | 0 | 0 | 0 | 0 | Not mapped |
| RFL174 | 0 | 0 | 1 | 0 | 0 | 0 | 2 | NO |
| RFL191 | 0 | 0 | 1 | 0 | 0 | 0 | 0 | Not mapped |

TABLE 11
selection of RFL based on germplasm CMS information for Rf-rye

| | | | | | | Restorer from Rye | Restorer |
|---|---|---|---|---|---|---|---|
| CMS genotype | MAINTAINER | Rf3 | Rf1 + Rf7 | Rf1 | Rf3 | introgression | Triticum |
| RFLGene | ANAPURNA | PRIMEPII | R197 | R0932E | R0934F | Wheat-Rye-6R | timopheevii |
| RFL46 | 0 | 0 | 0 | 0 | 0 | 1 | 0 |
| RFL87 | 0 | 0 | 0 | 0 | 0 | 1 | 0 |
| RFL208 | 0 | 0 | 0 | 0 | 0 | 1 | 0 |

### Example 5: Cloning of Candidate Genes for Fertility Restoration of T. timopheevii CMS

[0386] The nucleic acid sequence encoding any of the RFL proteins from a candidate Rf group could be used for cloning and transformation. However, in the present experiment for cloning and transformation purposes, a DNA sequence encoding the longest RFL protein which was characterized as having a start codon, mitochondrial targeting sequence and number of PPR motifs between 15 and 20 was preferentially used. If at least two longest RFL proteins happen to have the same length, the nucleic acid encoding such RFL protein, and presenting the longest 5′-UTR sequence will be preferentially chosen to perform the cloning and transformation steps.

[0387] Wheat-Rye-6R RFL46 sequence derived from Wheat-Rye-6R.300k_Assembly_Contig_35_1 was optimized to provide SEQ ID No3115. This sequence was cloned via a Golden Gate reaction into the destination binary plasmid pBIOS10746, between the constitutive Zea mays ubiquitin promoter (proZmUbi depicted in SEQ ID No 3134) with the Zea mays ubiquitin intron (intZmUbi, depicted in SEQ ID No 3109, Christensen et al 1992) and a 3′ termination sequence of the gene encoding a sorghum heat shock protein (accession number: Sb03g006880); The termination sequence, named terSbHSP, is depicted in SEQ ID No 3110. The sequence of the recombinant construct is depicted in SEQ ID No 3125.

[0388] Similarly as above, TaRFL104 sequence (derived from R0932E.300k_Assembly_Contig_82_1), TaRFL67 sequence (derived from Primepii.300k_Assembly_Contig_2_1), TaRFL79 sequence (derived from R197.300k_Assembly_Contig_120_1) and TaRFL89 sequence (derived from R0934F.300k_Assembly_Contig_99_1) were adapted for cloning purpose as depicted respectively in SEQ ID No 3117 to 3120. These sequences were cloned via a Golden Gate reaction into the destination binary plasmid pBIOS10746. The sequences of the recombinant constructs are respectively depicted in SEQ ID No 3131, 3128, 3129 and 3130.

[0389] TaRFL104 sequence (depicted in SEQ ID No 3117) was cloned via restriction enzyme reaction, between the native Triticum aestivum promoter (proTaRFL104, SEQ ID No 3113) and the 3′ termination sequence of Triticum aestivum RFL104 encoding gene (terTaRFL104, depicted in SEQ ID No 3112), into the destination binary plasmid pBIOS10747. The sequence of the recombinant construct is depicted in SEQ ID No 3126.

[0390] TaRFL79 sequence (depicted in SEQ ID No 3119) was cloned via restriction enzyme reaction, between the native Triticum aestivum promoter (proTaRFL79, SEQ ID No3123) and the 3′ termination sequence of T. aestivum RFL79 encoding gene (terTaRFL79, depicted in SEQ ID No 3124), into the destination binary plasmid pBIOS10747. The sequence of the recombinant construct is depicted in SEQ ID No3122.

[0391] Wheat-Rye RFL46 sequence was also cloned via restriction enzyme reaction, between the native Triticum aestivum promoter (proTaRFL46, SEQ ID No 3114) and the 3′ termination sequence of Triticum aestivum RFL46 encoding gene (terTaRFL46, depicted in SEQ ID No 3111), into the destination binary plasmid pBIOS10747. For this construct, Wheat-Rye RFL46 sequence is derived from Wheat-Rye-6R.300k_Assembly_Contig_35_1 coding sequence and modified for cloning purpose without any optimization steps. The coding sequence is depicted in SEQ ID No3116. The sequence of the recombinant construct is depicted in SEQ ID No3127.

[0392] The binary destination vectors pBIOS10746 and pBIOS10747 are a derivative of the binary vector pMRT (WO2001018192A3).

[0393] All the binary plasmids described above were transformed into Agrobacterium EHA105.

### Example 6: Transformation & Fertility Restoration Phenotyping Assays

[0394] In order to screen for candidate genes involved in fertility restoration, the BGA_Fielder_CMS wheat cultivar harboring both cytoplasmic male sterility and strong transformability and regeneration potential was developed. BGA_Fielder_CMS wheat cultivars were transformed with Agrobacterium strains obtained in example 5 essentially as described by WO 2000/063398. Wheat transgenic events were generated for each construct described above.

[0395] For construct comprising RFL46, transformation was also performed with the cultivar Fielder.

[0396] All wheat transgenic plants generated in example 6 and control fertile plants were grown in a glasshouse under standard wheat growth conditions (16 h of light period at 20° C. and 8 h of dark period at 15° C. with constant 60% humidity) until control grains of the wild type Fielder cultivar reached maturity stage.

[0397] Fertility of the transgenic plants was evaluated by counting the number of seeds and empty glumes per spikes on each plant and comparing with the wild type Fielder and BGA_Fielder_CMS control plants. Plants are also evaluated by observing anther extrusion.

[0398] 16 transformed CMS-Fielder plants overexpressing the RFL79 sequence recited in SEQ ID No361 (as listed in table 7) under the ZmUbi promoter derived from 11 independent transformation events were analyzed.

[0399] All the plants present restoration of male fertility while 100% of untransformed CMS-Fielder plants grown in parallel are fully sterile with no anther extrusion and no seed produced, and 100% of WT-Fielder plants are fertile.

[0400] These results confirm that RFL79 can restore fertility of a CMS-T plant and that genetic transformation of CMS-Fielder is an efficient system to test the function of restorer-of-fertility genes.

### Example 7: Cloning of Rf Gene Promoter, Transformation and GUS Assays

[0401] The E. coli beta-glucuronidase (EcGUS) sequence was optimized (as depicted in SEQ ID No3121) and cloned via restriction enzyme reaction, between the native Triticum aestivum promoter (proTaRFL46, SEQ ID No 3114) and the 3′ termination sequence of T. aestivum gene encoding RFL46 (terTaRFL46, depicted in SEQ ID No 3111), into the destination binary plasmid pBIOS10743 forming pBIOS11468.

[0402] Fielder wheat cultivars were transformed with these Agrobacterium strains essentially as described by WO 2000/063398. Wheat transgenic events were generated for each construct described above.

[0403] After booting stage until anthesis, heads and floral organs were dissected and incubated in X-Gluc solution (Jefferson, 1987) at 37° C. for 16 hours, to assess GUS expression.

### Example 8: Identification of Full Length RFL PPR Genes Potentially Involved in Rf4 Fertility Restoration

[0404] A second capture was achieved using a set of different accessions compared to the capture performed in example 2. The following accessions were used:
[0405] Two Maintainer lines (Anapurna, Fielder)
[0406] The T. timopheevii accession as described in example 2
[0407] Four accessions identified as restorer lines of T. timopheevii-type CMS and characterized by the presence of the Rf4 restorer locus: L13, R113, 17F3R-0377 and GSTR435.
[0408] Rf1, Rf3 and Rf7 restorer accessions which are characterized by the absence of the Rf4 restorer locus: R197, R0934F.

[0409] GSTR435 is derived from an introgression of Aegilops speltoïdes into Triticum aestivum and is available at USDA (https://npgsweb.ars-grin.gov/gringlobal/search.aspx). The three other accessions, R113 (available via Australian Grains Genebank: 90819), L13 (available via Australian Grains Genebank: 90821) and 17F3R-0377 (derived from R113) are all derived from Triticum timopheevi introgressions into Triticum aestivum.

[0410] The bait design and hybridization with DNA fragments from the accessions were performed as in example 2. Then, a subset of 100K read pairs from each accession were mapped to the RFL groups identified in table 7 using Novoalign (version 3.04.06, http://www.novocraft.com/products/novoalign/) with settings allowing multiple hits with approximately 97% of identity (options: -r all -t 240). The average coverage per RFL was then calculated using Bedtools utilities (version 2.26.0, http://github.com/arq5x/bedtools2) coverageBed (option: -d) and groupBy (options: -o mean).

[0411] The relative coverage of all RFLs with the reads from each accession was assessed. A first ranking of the RFLs according to their coverage with reads from accessions derived from T. timopheevii was assessed. Only RFL groups showing no coverage (value from 0 to 10) with reads from “non-Rf” (maintainer) or non-Rf4 accessions but showing significant coverage (value >30) with reads from Rf4 accessions were considered. FIG. 3 shows the list of these RFL groups potentially corresponding to the Rf4 gene.

[0412] The coverage with accession GSTR435 was also assessed. FIG. 3 shows that only RFL120 shows significant coverage in accession GSTR435, although lower than for the other accessions. This could be explained by a greater phylogenetic distance between T. aestivum and Aegilops speltoides than between T. aestivum and T. timopheevii.

[0413] In order to investigate further the sequences related to the RFL120 group, the reads mapping to RFL120 for each Rf4 accession were then assembled in two steps. The first step consisted of merging overlapping read pairs with the utility bbmerge.sh from the BBMAP package (version 36.59 https://sourceforge.net/projects/bbmap/) and assembling them with the utility tadwrapper.sh from the same package (options: k=150, 180, 210, 240, 270, 300, 330, 360, 390, 420, 450 bisect=t). The contigs from the first step were deduplicated with the tool dedupe.sh also from the same package and given to another assembler, SPADES (version 3.10.1 http://bioinf.spbau.ru/spades), as “trusted contigs” along with all read pairs from the same accession (options: --coy-cutoff 5 -careful) to generate the final assembly of the accession. Then for each accession the protein sequence RFL120 (SEQ ID No 477 as listed in table 7) best hit was searched using the tblastn utility from the BLAST+ package (version 2.2.30 https://blast.ncbi.nlm.nih.gov/Blast.cgi?PAGE_TYPE=BlastDocs&DOC_TYPE=Download) using default settings.

[0414] The following sequences were finally identified to be included in the RFL120 group:

[0415] RFL120-R113 which is depicted in SEQ ID No3138 and is encoded by SEQ ID No3142, RFL120-L13 which is depicted in SEQ ID No3137 and is encoded by SEQ ID No3141, RFL120-17F3R-0377 is depicted in SEQ ID No3135 and is encoded by SEQ ID No3139 and finally RFL120-GSTR 435 (called here RFL120-spelt) is depicted in SEQ ID No3136 and is encoded by SEQ ID No3140.

[0416] Alignment between the above amino acid or nucleotide sequences with the corresponding sequences from RFL120, called here “RFL120_timo”, and recited in SEQ ID No477 and SEQ ID No2031 (see table 7) shows that RFL120-17F3R-0377 is truncated. Regarding RFL120-R113 and RFL120-L13, the nucleotide sequences are both identical to RFL120-timo except that they are respectively 357 and 349 nucleotides longer on the 5′UTR region.

[0417] FIGS. 4a and 4b shows respectively the alignment between nucleotide and amino acid sequences of RFL120-spelt with RFL120-timo. This shows that RFL120-timo nucleotide sequence is 95% identical to the “RFL120_spelt” one which explains the low coverage previously observed with GSTR435 in FIG. 3.

[0418] In conclusion, the results confirm that the RFL120 group is the strongest candidate for Rf4.

### Example 9: Cloning, Transformation and Fertility Restoration Assays

[0419] Following the same methods as described in Examples 5 and 6, the nucleotide sequences of RFL120-timo, RFL120-spelt, RFL120-R113 and RFLK120-L13 are, when appropriate, optimized for ensuring proper expression in wheat and adapted for cloning purposes.

[0420] These sequences are cloned via a Golden Gate reaction into the destination binary plasmid pBIOS10746, between the constitutive Zea mays ubiquitin promoter (proZmUbi depicted in SEQ ID No 3134) with the Zea mays ubiquitin intron (intZmUbi, depicted in SEQ ID No 3109, Christensen et al 1992) and a 3′ termination sequence of the gene encoding a sorghum heat shock protein (accession number: Sb03g006880); The termination sequence, named terSbHSP, is depicted in SEQ ID No 3110.

[0421] Transformation and fertility assays are performed as in Example 6.

### Example 10: Evaluation of the CMS T. timopheevii Rf3 Restorer Lines Fertility

[0422] Eleven wheat elite lines classified as carrying Rf3 restorer gene known to be involved in restoration of the T-type cytoplasmic male sterility in Triticum timopheevii (T-CMS) were assessed for their capacity to restore the T-CMS cytoplasm and characterized for their fertility genotype. Hybrids resulting from crosses between a sterile CMS wheat line, used as a female parent, and a given wheat restorer line, used as a pollen donor, were studied regarding their ability to produce grain. The elite lines included both commercially available lines such as Altigo, Aristote, Cellule, Altamira, Rubisko, Primepii or Premio as well as Limagrain proprietary lines (Table 12). In addition, Chinese Springlines were included in the study (Table 12).

[0423] Fertility tests have been conducted indoors, either in growth chamber or in greenhouse, under controlled growth conditions enabling a normal expression of the fertility phenotype of the tested wheat plants. The plants were grown under 16 hours light period and temperature between 20 and 25° C. and 8 hours dark period at a temperature between 15° C. and 20° C., with humidity between 50 and 70%. The observed restoration of pollen fertility may be partial or complete.

[0424] The fertility score of F1 wheat plants carrying T-CMS cytoplasm may be calculated by dividing the total number of seeds threshed from a spike by the number of counted spikelets and may be compared with the fertility scores of a panel of control fertile plants which in this study consists of elite inbred lines bearing a normal wheat cytoplasm, grown in the same area and under the same agro-environmental conditions. It is preferred that such panel of lines comprises a set of at least 5 elite inbred lines. Besides, it is preferred that at least 10 spikes from different F1 individual plant will be assessed for a given experiment.

[0425] Fertility score i higher than zero (>0) indicates that the plant has acquired partial or full fertility restoration. For each fertility score, a statistical test is achieved to obtain a p-value. Examples of statistical tests are the Anova or mean comparison tests. A p-value below a 5% threshold will indicate that the two distributions are statistically different. Therefore, a significantly lower fertility score of the tested wheat plant as compared to the fertility score of the fertile control plant is indicative that the F1 plant has not acquired full restoration fertility (i.e. partial restoration). A significantly similar or higher fertility score is indicative that the F1 plant has acquired full restoration of fertility. The fertility scores indicated were calculated by dividing the total number of seeds threshed from a spike by the number of counted spikelets.

[0426] The t-tests were conducted by comparing the fertility scores of F1 plants carrying Rf3 restorer gene and the fertility scores of a panel of elite inbred lines grown under the same conditions (633 spikes from 37 winter and spring elite lines; p=2.36, a=0.59).

[0427] The results presented in Table 12 show that there are two types of partial Rf3 restorer of fertility in the CMS hybrids. One that can be referred to as “Rf3” and which fertility scores are comprised between 1 and 1.8, and a second type referred to as “Rf3 weak” which fertility scores are less than 1. For example, the CMS-hybrids made with Primepii produced an average fertility score of 1.7 grains/spikelet over 10 individual F1 spikes (“Rf3” phenotype) while hybrids made with Altigo produced an average fertility score of 0.7 grains/spikelet over 47 individual F1 spikes (“Rf3 weak” phenotype) (Table 12). Different Chinese Spring lines were shown by genetic mapping and marker assisted selection to harbor an Rf3 restorer locus (data not shown). CMS-hybrids made with Chinese Spring lines were evaluated for fertility score. They show a mean estimated fertility score of 0.6 grains/spikelet and a “Rf3 weak” phenotype.

TABLE 12
Wheat elite lines used in the study and the fertility
scores of CMS-hybrids generated with their pollen.

| | | | Number of | | |
|---|---|---|---|---|---|
| | | | analysed | Fertility | |
| Elite variety | Genotype | Phenotype | spikes | score | STD |
| CHINESE | RFL29b | Rf3 weak | 20 | 0.6 | 0.7 |
| SPRING | | | | | |
| ALTIGO | RFL29b | Rf3 weak | 47 | 0.7 | 0.5 |
| ARISTOTE | RFL29b | Rf3 weak | 43 | 0.8 | 0.8 |
| CELLULE | RFL29a | Rf3 | 10 | 1.2 | 1.0 |
| ALTAMIRA | RFL29a | Rf3 | 20 | 1.5 | 1.1 |
| PREMIO | RFL29a | Rf3 | 12 | 1.2 | 1.0 |
| PRIMEPII | RFL29a | Rf3 | 10 | 1.7 | 0.8 |
| R0946E | RFL29a | Rf3 | 35 | 1.8 | 0.6 |
| RUBISKO | RFL29a | Rf3 | 7 | 1.2 | 0.6 |
| TJB155 | RFL29a | Rf3 | 27 | 1.7 | 0.7 |
| ATOMO | RFL29c | Maintainer | 22 | 0.0 | 0.0 |
| CONTROL | | | 633 | 2.4 | 0.6 |
| ELITES | | | | | |

*NA: Not available, STD: Standard Deviation

### Example 11: Comparison of Genotypes Between the Analyzed Rf3 Restorer Lines

[0428] The RFL gene capture was achieved with accessions listed in Table 12 as described in Example 2. For each RFL identified in Example 4B, the corresponding protein sequences from each accession were aligned for comparison.

[0429] The results show that for RFL29, RFL164 and RFL166, strong association between the phenotype and the genotype exist. For RFL29, three different alleles referred to as “a”, “b” and “c” were identified while two different alleles “a” and “b” are identified either for RFL164 or RFL166. All accessions with an “Rf3” phenotype carry RFL29a, RFL164a and RFL166a alleles while all the “Rf3 weak” accessions carry RFL29b, RFL166b and RFL164b alleles in their genotype

[0430] For RFL29, the maintainer line Atomo is characterized by the presence of two truncated ORFs, probably due to a frameshift mutation, RFL29c_1 and RFL29c_2, encoding proteins consisting of 258 and 535 amino acids, respectively. This genotype form is only present in maintainer lines (data not shown).

[0431] FIG. 5A shows the protein sequence alignment of RFL29a, RFL29b, RFL29c_1 and RFL29c_2. FIGS. 5B and 5C, respectively, show the protein sequence alignments of RFL164a and RFL164b (depicted in SEQ ID No3144), and RFL166a and RFL166b (depicted in SEQ ID No3145).

### Example 12: Cloning, Transformation and Fertility Restoration Assays

[0432] Following the same methods as described in Examples 5 and 6, the nucleotide sequences of RFL29a (depicted in SEQ ID No3146 or SEQ ID No1712 and encoding a sequence identical to SEQ ID No158), RFL29b (depicted in SEQ ID No 3149 and encoding a sequence identical to SEQ ID No3143), RFL164a (depicted in SEQ ID No 3147 or SEQ ID NO 2230 and encoding a sequence identical to SEQ ID No676), and RFL166a (depicted in SEQ ID No 3148 or SEQ ID NO:2238 and encoding a sequence identical to SEQ ID No684), were cloned via a Golden Gate reaction into destination binary plasmid pBIOS10746, between the constitutive Zea mays ubiquitin promoter (proZmUbi depicted in SEQ ID No 3134) with the Zea mays ubiquitin intron (intZmUbi, depicted in SEQ ID No 3109, Christensen et al 1992) and a 3′ termination sequence of the gene encoding a sorghum heat shock protein (accession number: Sb03g006880 terSbHSP depicted in SEQ ID No 3110). The sequences of each of the recombinant constructs are respectively depicted in SEQ ID No3150, SEQ ID No3151, 3152 and 3153.

[0433] Similarly, the RFL29a and RFL29b sequences were cloned downstream of their endogenous promoter pRFL29a (depicted in SEQ ID No3154) and pRFL29b (depicted in SEQ ID No3155) and the terminator sequence terSbHSP. The sequences of each of the recombinant construct are respectively depicted in SEQ ID No3156 and SEQ ID No3157.

[0434] Finally, two other cassettes were made identically as described previously with the only exception that the corresponding endogenous terminator sequences terRFL29a (depicted in SEQ ID No3160) and terRFL29b (depicted in SEQ ID No3161) are used. The corresponding expression cassettes are respectively depicted in SEQ ID No3158 and SEQ ID No3159. Transformation and fertility assays are performed as in Example 6.

### Example 13: Comparison of the 5′UTR Sequence of the RFL29a and RFL29b Encoding Gene

[0435] In order to analyze whether the variation of the level of fertility could be explained by a variation in the gene expression level, the 5′UTR sequence of RFL29a gene was isolated from BACs generated from TJB155 line (Table 12) classified as “Rf3” and the 5′UTR sequence of RFL29b was identified from the Chinese Spring classified as “Rf3weak” line (IWGSC RefSeq v1.0 assembly).

[0436] The alignment of the 5′UTR regions identified in the RFL29a and RFL29b genes is shown in FIG. 6.

[0437] Sequence comparison shows that the 5′UTR sequence of the RFL29a gene comprises a deletion of the 163 bp-long region identified in the 5′UTR of RFL29b corresponding sequence (SEQ ID NO: 3174). Part of this region has been identified in the patent application WO2018015403 as being putatively involved in miRNA-mediated repression of the expression of the PPR gene identified downstream.

[0438] Sequence comparison between the different accessions listed in Table 12 shows that all “Rf3weak” accessions harbor the 163 bp and all the “Rf3” accessions harbor the 163 bp deletion.

[0439] Because of the 163 bp deletion in the 5′UTR sequence of RFL29a gene, it is expected that the 163 bp region impairs the expression of RFL29b gene such that the fertility level is weak in lines harboring the RFL29b allele compared to lines harboring the RFL29a allele.

### Example 14: Cloning, Transformation and Fertility Assays with a Deleted TaRFL29b Promoter

[0440] Following the same methods as described in Example 5, the nucleotide sequence of RFL29b was expressed under the modified promoter pRFL29bdel (depicted in SEQ ID No3162) which is bearing a deletion of the 163 bp region, from the nucleotide 1876 to nucleotide 2038 of the RFL29b promoter sequence depicted in SEQ ID No3155. The termination sequence, terSbHSP, depicted in SEQ ID No3110 is used. The recombinant construct is depicted in SEQ ID No3163.

[0441] Transformation of CMS*Fielder wheat line (which is either not “Rf3” or “Rf3 weak”) is performed as in Example 6 except that the following controls are added: all of the “Rf3” phenotype lines as listed in Table 12, all of the “Rf3 weak” lines as listed in Table 12 and finally the transformed lines with the cassette harboring the pTaRFL29b promoter upstream to RFL29b as described in example 12.

### Example 15: Modification of the Endogenous Promoter of RFL29b by CRISPR Technology to Revert “Rf3weak” Lines to “Rf3” Lines

[0442] In order to increase the expression of RL29b, different deletions of the 163 bp are performed in the promoter of RFL29b using endonuclease for site-directed mutagenesis.

[0443] Table 13 provides the different endonucleases with the associated PAM motif and the corresponding target sequences.

[0444] FIG. 7 shows the position of the different target sequences around and within the 163 bp region identified for different endonucleases. The designed guide sequences that can be used in combination to perform a deletion in the 163 bp region are listed in Table 13.

TABLE 13

| Endonuc | | | |
|---|---|---|---|
| leases | Target_ID | Target name | guide sequence |
| LbCPF1 | 23 | LbCpf1-100- | TAATTTCTACTAAGTGTAGATCGAGCGGAGGG |
| | | Target-23 | AGTACTAGATAA(SEQ ID NO: 3175) |
| LbCPF1 | 42 | LbCpf1-100- | TAATTTCTACTAAGTGTAGATGGAACGGAGGG |
| | | Target-42 | AGTATTATCTAG(SEQ ID NO: 3176) |
| LbCPF1 | 67 | LbCpf1-100- | TAATTTCTACTAAGTGTAGATAGATAGCTAGAA |
| | | Target-67 | AGACAATTATT(SEQ ID NO: 3177) |
| LbCPF1 | 71 | LbCpf1-100- | TAATTTCTACTAAGTGTAGATTTTGAGATAGCT |
| | | Target-71 | AGAAAGACAAT(SEQ ID NO: 3178) |
| SpCAS9 | 14 | SpCas9-100- | TGACAAGTATTTCCGAGCGGGTTTTAGAGCTA |
| | | Target-14 | GAAATAGCAAGTTAAAATAAGGCTAGTCCGTTA |
| | | | TCAACTTGAAAAAGTGGCACCGAGTCGGTGCT |
| | | | TTT(SEQ ID NO: 3179) |
| SpCAS9 | 54 | SpCas9-100- | GACAATTATTTAGGAACGGAGTTTTAGAGCTAG |
| | | Target-54 | AAATAGCAAGTTAAAATAAGGCTAGTCCGTTAT |
| | | | CAACTTGAAAAAGTGGCACCGAGTCGGTGCTT |
| | | | TT(SEQ ID NO: 3180) |
| SpCAS9 | 55 | SpCas9-100- | AGACAATTATTTAGGAACGGGTTTTAGAGCTAG |
| | | Target-55 | AAATAGCAAGTTAAAATAAGGCTAGTCCGTTAT |
| | | | CAACTTGAAAAAGTGGCACCGAGTCGGTGCTT |
| | | | TT(SEQ ID NO: 3181) |
| SpCAS9 | 58 | SpCas9-100- | GAAAGACAATTATTTAGGAAGTTTTAGAGCTAG |
| | | Target-58 | AAATAGCAAGTTAAAATAAGGCTAGTCCGTTAT |
| | | | CAACTTGAAAAAGTGGCACCGAGTCGGTGCTT |
| | | | TT(SEQ ID NO: 3182) |
| SpCAS9 | 63 | SpCas9-100- | AGCTAGAAAGACAATTATTTGTTTTAGAGCTAG |
| | | Target-63 | AAATAGCAAGTTAAAATAAGGCTAGTCCGTTAT |
| | | | CAACTTGAAAAAGTGGCACCGAGTCGGTGCTT |
| | | | TT(SEQ ID NO: 3183) |
| SpCAS9 | 155 | SpCas9-100- | TTTCAACAAATGACTACATAGTTTTAGAGCTAG |
| | | Target-155 | AAATAGCAAGTTAAAATAAGGCTAGTCCGTTAT |
| | | | CAACTTGAAAAAGTGGCACCGAGTCGGTGCTT |
| | | | TT(SEQ ID NO: 3184) |
| SpCAS9 | 179 | SpCas9-100- | CTCTAGAGAGACAATTATTTGTTTTAGAGCTAG |
| | | Target-179 | AAATAGCAAGTTAAAATAAGGCTAGTCCGTTAT |
| | | | CAACTTGAAAAAGTGGCACCGAGTCGGTGCTT |
| | | | TT(SEQ ID NO: 3185) |
| SpCAS9 | 184 | SpCas9-100- | GAGAGACAATTATTTAGGAAGTTTTAGAGCTAG |
| | | Target-184 | AAATAGCAAGTTAAAATAAGGCTAGTCCGTTAT |
| | | | CAACTTGAAAAAGTGGCACCGAGTCGGTGCTT |
| | | | TT(SEQ ID NO: 3186) |

[0445] The nucleotide sequence encoding for LbCpf1 endonuclease is optimized (as depicted in SEQ ID No3164) and cloned via a Golden Gate reaction into the destination binary plasmid pBIOS10746, between the constitutive Zea mays ubiquitin promoter (proZmUbi depicted in SEQ ID No 3134) with the Zea mays ubiquitin intron (intZmUbi, depicted in SEQ ID No 3109, Christensen et al 1992) and in the 3′ region, the mouse nuclear import NLS sequence (as depicted in SEQ ID No 3172) and the 3′ termination sequence terZmHSP depicted in SEQ ID No 3170.

[0446] The nucleotide sequence encoding for SpCas9 endonuclease is optimized (as depicted in SEQ ID No 3165) and cloned via a Golden Gate reaction into the destination binary plasmid pBIOS10746, downstream to the constitutive Zea mays ubiquitin promoter (proZmUbi depicted in SEQ ID No 3134) with the Zea mays ubiquitin intron (intZmUbi, depicted in SEQ ID No 3109, Christensen et al 1992) and the SV40NLS sequence (as depicted in SEQ ID No 3173) and upstream of the mouse nuclear import NLS sequence and the 3′ termination sequence terAtNos depicted in SEQ ID No 3171.

[0447] Each guide sequence is cloned between the pTaU6 promoter (depicted in SEQ ID No 3168) and the termination sequence TerRNApolIII (depicted in SEQ ID No3169).

[0448] Each cassette expressing the endonuclease is cloned consecutively to the cassette expressing the corresponding guide sequence. A recombinant cassette expressing LbCpf1 and guide sequences directed to target -23 and target -71 is depicted in SEQ ID No3167. A recombinant cassette expressing SpCas9 and guide sequences directed to target −58 and target −54 is depicted in SEQ ID No3166.

[0449] Transformation is performed as in Example 6 except that all “Rf3 weak” lines as listed in Table 12 are transformed. Fertility assays to select lines with an “Rf3” phenotype are performed as in example 14.

### Example 16: Evaluation of the CMS T. timopheevii Restorer Lines Fertility

[0450] Some wheat elite lines possess an ability to partially restore the fertility of the cytoplasmic male sterility Triticum timopheevii (T-CMS). The hybrid formed between a sterile CMS wheat line taken as female and the wheat restorer line taken as male can produce grain. Commercial lines as Allezy, Altamira, Altigo, Aristote, Osado, Cellule or Premio and Limagrain proprietary lines have been tested for their capacity to restore T-CMS. All lines have also been characterized for their fertility genotype.

[0451] Fertility tests have been conducted indoor, either in growth chamber or in greenhouse, under controlled growth conditions enabling a normal expression of fertility of the tested wheat plants. The fertility scores indicated have been calculated by dividing the total number of seeds threshed from a spike by the number of counted spikelets. The t-tests conducted were done by comparing the fertility scores of F1s made with a restorer and the fertility scores of a panel of elite inbred lines grown under the same conditions (633 spikes from 37 winter and spring elite lines; p=2.36, a=0.59).

[0452] The results in Table 14 show that these lines act as partial restorer of fertility in a CMS hybrid. For example, the hybrids made with Allezy produce an average fertility of 0.99 grains/spikelets over 33 individual F1 spikes. This native ability to partially restore the fertility of the CMS T. timopheevii was previously identified in wheat accessions as Primepii or Maris Hunstmann (Bahl and Maan, 1973), and it is confirmed by our own internal data (See Table 14). Beside this supposedly wheat intrisic source of restoration, the hybridizations between Triticum timopheevii and Triticum aestivum conducted by Wilson (Wilson and Ross 1962) contributed to the introduction into wheat of further restorer genes which chromosome arm localization was identified through monosomic analysis (Bahl and Maan, 1973; Maan and al, 1984).

[0453] Following these initial works many breeding programs implemented worldwide aimed at creating restorer lines for the T-CMS such as TJB155 (BBSRC Small Grain Cereals Collection: 2072 to 2075), which ability to restore is also confirmed by our own internal data (Table 14).

[0454] L13 (available via Australian Grains Genebank: 90821), is a wheat restorer line selected from R113 (available via Australian Grains Genebank: 90819) which carries the restorer allele Rf4. It produces a low level of fertility restoration when crossed with CMS lines (0.85 seeds/spikelet on average). When compared with the fertility scores of a panel of elite lines grown under the same conditions it appears that none of the tested putative restorer make possible a full restoration of fertility of the hybrid (p-values <0.05. table 14).

[0455] Table 14 also shows that restorer lines bearing two different Rf loci, are not able to fully restore the sterility induced by T-CMS. Therefore, all restorer lines tested, with single or two Rf loci are only partial T-CMS restorer lines.

TABLE 14
mean fertility scores and standard deviation from the indicated number of spikes. The
first column indicates the name of the male line taken as pollinator for the F1 cross.
All the data (except for Elite inbred lines) presented are from the created F1 crosses
between the listed lines and a CMS tester. “Elite inbred lines” data refers
to a panel consisting of 37 winter and spring elite lines. The t-test was implemented
comparing the mean of fertility for each of the F1 crosses with the mean of the fertility
scores of a panel of 633 spikes of elite inbred lines bearing fertile cytoplasm.

| | Haplotypes | SPIKES | FERTILITY | STD DEV | P-VALUE |
|---|---|---|---|---|---|
| ALLEZY | Rf3 | 33 | 0.99 | 0.89 | 3.00E−33 |
| ALTAMIRA | Rf3 | 20 | 1.48 | 1.1 | 4.00E−10 |
| ALTIGO | Rf3 | 47 | 0.71 | 0.55 | 1.00E−63 |
| ARISTOTE | Rf3 | 37 | 1 | 0.73 | 3.00E−37 |
| CELLULE | Rf3 | 10 | 1.25 | 0.99 | 5.00E−09 |
| MARISHUNSTMANN | Rf3 | 16 | 1.26 | 0.88 | 7.00E−13 |
| OSADO | Rf3 | 9 | 1.52 | 0.68 | 2.00E−05 |
| PREMIO | Rf3 | 12 | 1.21 | 1.03 | 8.00E−11 |
| PRIMEPII | Rf3 | 51 | 1.55 | 0.75 | 2.00E−19 |
| TJB155 | Rf3 | 27 | 1.7 | 0.66 | 2.00E−08 |
| R204 | Rf1 + Rf7 | 59 | 2.09 | 0.51 | 6.00E−04 |
| L13 | Rf4 | 12 | 0.85 | 0.38 | 4.00E−18 |
| R0929D | Rf3 + Rf7 | 18 | 1.83 | 0.62 | 1.63E−04 |
| R0936T | Rf1 + Rf3 | 4 | 1.76 | 0.11 | 4.06E−02 |
| ELITE inbred lines | | 633 | 2.36 | 0.59 | |

### Example 17: Fine Mapping of the Genomic Region Containing Rf1, Rf3 and Genetic Mapping of Rf4 and Rf7 Genetic Determinants

[0456] A. Fine-Mapping of the Genomic Region Containing Rf1 Genetic Determinants

[0457] Three F2 mapping populations segregating for Rf1 (R197xKalahari, R204xAlixan and R0932ExAltigo) encompassing 210, 218 and 212 individuals respectively were phenotyped as described in example 1 and genotyped with 18100 SNP markers using Limagrain's internal genotyping platform. Fertility of R204 and R197 lines is genetically associated to Rf1 and Rf7 locus. Fertility in R0932E line is associated to Rf1 locus.

[0458] Rf1 was first mapped on the short arm of the chromosome 1A between 4 cM and 10.9 cM on Limagrain's internal consensus map and physically delimited by SNP markers cfn1087371 and cfn0530841. These two SNP markers delimit the largest possible interval defined by the three mapping populations (see FIG. 8).

[0459] Following, joint analysis of the three mapping populations and phenotyping of the individual F2 recombinant plants on derived F3 families validated the QTL position and delimited Rf1 interval between 7 cM and 8.9 cM on Limagrain's internal consensus map and physically delimited by SNP markers cfn1082074 and cfn0523990. We used the genomic resources of the IWGSC Whole genome assembly, ‘IWGSC WGA’ (available from June 2016 from the URGI IWGSC repository) to anchor the locus to the wheat genome reference physical map. The left border (cfn1082074) was anchored on the IWGSCWGAV02_1AS_scaffold44309 scaffold and the right border (cfn0523990) was anchored on the IWGSCWGAV02_1AS_scaffold47238 scaffold.

[0460] Next, we decided to enlarge the population sizes to fine-map the locus and screened 2976 and 3072 F3 lines from R197xKalahari and R204xAlixan derived from F2 plants heterozygote at the locus respectively. Phenotyping and analysis of recombinant plant progenies within the interval redefined a smaller mapping interval between 7.5 and 8.8 cM delimited by cfn0522096 and cfn0527067 SNP markers on the M/GSCWGAV02_1AS_scaffold44309 scaffold and the M/GSCWGAV02_1AS_scaffold47238 scaffold respectively.

[0461] B. Fine-Mapping of the Genomic Region Containing Rf3 Genetic Determinants

[0462] Three F2 mapping populations (TJB155xAnapurna, 2852xAltamira, and AH46xR0946E) encompassing 217, 135, and 246 individuals respectively and a doubled-haploid (DH) population (H46xR934F) consisting of 140 individual plants segregating for Rf3 were phenotyped as described in example 1 and genotyped with 18100 SNP markers using Limagrain's internal genotyping platform. Sources of Rf3 locus are TJB155, Altamira and R0946E.

[0463] Rf3 was first mapped on the short arm of the chromosome 1B between 18.9 cM and 24.2 cM on Limagrain's internal consensus map and physically delimited by SNP markers cfn0554333 and cfn0560679. These two SNP markers delimit the largest possible interval defined by the four mapping populations (see FIG. 9).

[0464] Following, joint analysis of the four mapping populations and validation of the phenotype of the individual F2/DH recombinant plants on derived F3 families validated the QTL, genetically delimited the locus between 22.2 cM and 22.7 cM on Limagrain's internal consensus map and physically delimited the Rf3 interval between SNP markers cfn0436720 and cfn0238384. We used the genomic resources of the IWGSC Whole genome assembly, ‘IWGSC WGA’ (available from June 2016 from the URGI IWGSC repository) to anchor the locus to the physical map. The left border (cfn0436720) was anchored on the IWGSCWGAV02_1BS_scaffold35219 scaffold and the right border (cfn0238384) was anchored on the IWGSCWGAV02_1BS_scaffold5117 scaffold.

[0465] Next, we decided to enlarge the population sizes to fine-map the locus and screened 2496 and 672 plants from TJB155xAnapurna and AH46xR0946E derived F2 plants heterozygote at the locus. Analysis of recombinant F3 plant progenies within the interval redefined a smaller mapping interval between 22.5 and 22.7 cM delimited by cfn1249269 and BS00090770 SNP markers on the IWGSCWGAV02_1BS_scaffold35219 scaffold and the IWGSCWGAV02_1BS_scaffold5117 scaffold respectively.

[0466] C. Mapping of the Genomic Region Containing Rf7 Genetic Determinants

[0467] We crossed R197 (harboring Rf1 and Rf7 locus) and Primepii (harboring Rf3 locus) and then derived a population of 176 plants from individuals that were rf1 and rf3, which means not carrying the restorer alleles at the loci Rf1 and Rf3. The plants were genotyped with 18100 SNP markers using Limagrain's internal genotyping platform and phenotyped as described in example 1. We mapped the Rf7 locus on chromosome 7BL. Moreover, internal genotyping data showing a strong genetic divergence suggests the presence of an exotic chromosomal fragment which is stably transmitted through generation. We identified a large QTL ranging from 45 cM to 88 cM on chromosome 7B on Limagrain's internal consensus map with a peak on 46.7 cM (cfn0919993 with LOD score of 3.37E-40). First expertise of the recombinant plants suggests the Rf7 gene could be located between cfn3407185 and W90K_RAC875_c33564_120 markers delimiting a mapping interval of 0.3 cM between 46.7 cM and 47 cM on Limagrain's internal consensus map.

[0468] D. Mapping of the Genomic Region Containing Rf4 Genetic Determinant

[0469] A mapping population from the cross between AH46 and L13 (harboring Rf4 locus) consisting of 124 individual plants segregating for Rf4 was genotyped with 18100 SNP markers using Limagrain's internal genotyping platform and phenotyped as described in example 1. A QTL that we named Rf4 was identified on chromosome 6B between 0 cM to 65 cM on Limagrain's internal consensus map with a peak on 43.3 cM (cfn0393953 with LOD score of 1.08E-13). Moreover, internal genotyping data showing a strong genetic divergence suggests the presence of an exotic chromosomal fragment which is stably transmitted through generation. It is expected that the rate of recombination be very low within this chromosomal region and, consequently, any marker in linkage with cfn0393953 is considered to be associated with Rf4 locus.

### Example 18: Identification of SNP Associated with the Rf Genes and its Use in MAS

[0470] We constructed a BAC library with a DH line comprising Rf1, Rf3 and Rf7 alleles. This library was used for the identification of BAC clones within the Rf1 and Rf3 QTL intervals. More specifically, we identified and sequenced and genetically validated 3 BAC clones within the Rf1 region and 3 BAC clones within the Rf3 region. The BAC sequences were compared to Chinese Spring reference genome for SNP discovery. We then saturated Rf1 and Rf3 mapping intervals by mining available SNPs from public genomic resources and the newly discovered SNPs from sequenced BAC clones.

[0471] Screening for polymorphic and informative SNP markers on a diversity panel consisting of 83 wheat elite plants and known restorers for Rf1, Rf3, Rf4 and Rf7 identified a set of tightly linked markers localized within or in the immediate flanking regions of the Rf1, Rf3, Rf4 and Rf7 mapping intervals. These SNP markers can be used alone and/or in haplotype to select for Rf or rf plants in MAS breeding schemes (FIG. 10A and FIG. 11A). Allele information, marker sequences and primer information are provided in Table 15. Following, smaller sets of 2-3 markers of high quality were chosen to follow the traits in MAS breeding schemes.

[0472] As an example, the identification of the presence of the Rf1 locus in the genome of a plant is achieved by using either the marker 276113_96622_97797 or 104A4_105588 (FIGS. 10A and B).

[0473] Similarly, the identification of the presence of the Rf3 locus in the genome of a plant is achieved by using either the marker 136H5_3 M5_7601 or 136H5_3 M5_89176 (FIG. 11A, 11B, 11C, 11D and Table 15). However, any marker listed on the FIG. 11A can be used to distinguish the maintainer lines from the restorer lines if they are polymorphic in the germplasm. As an example, in the Table 16, the presence vs absence of the Rf3 locus is achieved by using either the marker cfn1246088 or IWB72107

[0474] The identification of the presence of the Rf7 locus in the genome of a plant is achieved by using the markers cfn0917304, cfn0919993 and cfn0920459 (Table 17). In this case the 3 markers might be used in haplotype to distinguish restorer plants from maintainer plants. Thus the haplotype TGC would identify the restorer plants.

[0475] Finally, the identification of the presence of the Rf4 locus in the genome of a plant is achieved by using the markers cfn0393953 and cfn0856945 (Table 18).

TABLE 15
Haplotypes of a series of restorer lines and maintainer lines at the locus
Rf3 for 2 SNP markers. Those 2 SNP markers makes possible to fully distinguish
the maintainer lines from the restorer lines (including the elite lines
Altamira, Cellule, Premio and the accessions TJB155 and Primepi).

| | R: restorer/ | | | |
|---|---|---|---|---|
| CODE | M: maintainer | Rf alleles | 136H5_3M5_7601 | 136H5_3M5_89176 |
| LGWR16-0016 | R | homozygous Rf3 | T | A |
| LGWR16-0026 | R | homozygous Rf3 | T | A |
| ALTAMIRA | R | homozygous Rf3 | T | A |
| CELLULE | R | homozygous Rf3 | T | A |
| TJB155 | R | homozygous Rf3 | T | A |
| ALLEZY | R | homozygous Rf3 | T | A |
| PREMIO | R | homozygous Rf3 | T | A |
| PRIMEPI | R | homozygous Rf3 | T | A |
| AIGLE | M | homozygous rf3 | C | G |
| AIRBUS | M | homozygous rf3 | C | G |
| ALHAMBRA | M | homozygous rf3 | C | G |
| ALIXAN | M | homozygous rf3 | C | G |
| AMADEUS | M | homozygous rf3 | C | G |
| ANAPURNA | M | homozygous rf3 | C | G |
| APACHE | M | homozygous rf3 | C | G |
| ARKEOS | M | homozygous rf3 | C | G |
| ARLEQUIN | M | homozygous rf3 | C | G |
| ARTDECO | M | homozygous rf3 | C | G |
| ARTURNICK | M | homozygous rf3 | C | G |
| ATOMO | M | homozygous rf3 | C | G |
| AVENUE | M | homozygous rf3 | C | G |
| CEZANNE | M | homozygous rf3 | C | G |
| CROISADE | M | homozygous rf3 | C | G |
| FRUCTIDOR | M | homozygous rf3 | C | G |
| GAZUL | M | homozygous rf3 | C | G |
| HERMANN | M | homozygous rf3 | C | G |
| HORATIO | M | homozygous rf3 | C | G |
| KALAHARI | M | homozygous rf3 | C | G |

TABLE 16
Haplotypes of a series of restorer lines and maintainer lines at the
locus Rf3 for 2 SNP markers. Those 2 SNP markers makes possible to
fully distinguish the maintainer lines from the restorer lines.

| | R: restorer/ | | | |
|---|---|---|---|---|
| CODE | M: maintainer | Rf alleles | cfn1246088 | IWB72107 |
| ALTIGO | R | homozygous Rf3 | A | A |
| ARISTOTE | R | homozygous Rf3 | A | A |
| OSADO | R | homozygous Rf3 | A | A |
| AIGLE | M | homozygous rf3 | C | G |
| AIRBUS | M | homozygous rf3 | C | G |
| ALHAMBRA | M | homozygous rf3 | C | G |
| ALIXAN | M | homozygous rf3 | C | G |
| AMADEUS | M | homozygous rf3 | C | G |
| ANAPURNA | M | homozygous rf3 | C | G |
| APACHE | M | homozygous rf3 | C | G |
| ARKEOS | M | homozygous rf3 | C | G |
| ARLEQUIN | M | homozygous rf3 | C | G |
| ARTDECO | M | homozygous rf3 | C | G |
| ARTURNICK | M | homozygous rf3 | C | G |
| ATOMO | M | homozygous rf3 | C | G |
| AVENUE | M | homozygous rf3 | C | G |
| CEZANNE | M | homozygous rf3 | C | G |
| CROISADE | M | homozygous rf3 | C | G |
| FRUCTIDOR | M | homozygous rf3 | C | G |
| GAZUL | M | homozygous rf3 | C | G |
| HERMANN | M | homozygous rf3 | C | G |
| HORATIO | M | homozygous rf3 | C | G |
| KALAHARI | M | homozygous rf3 | C | G |

TABLE 17
Haplotypes at the Rf7 locus for the restorer lines LGWR16-0016 and LGWR16-
0026 and for a series of maintainer lines. “—” scores correspond
to dominant markers with no amplification in several maintainer lines.

| | R: restorer/ | | | | |
|---|---|---|---|---|---|
| CODE | M: maintainer | Rf alleles | cfn0917304 | cfn0919993 | cfn0920459 |
| LGWR16-0016 | R | homozygous Rf1, Rf3, Rf7 | T | G | C |
| LGWR16-0026 | R | homozygous Rf1, Rf3, Rf7 | T | G | C |
| AIGLE | M | homozygous rf1, rf3, rf7 | G | — | G |
| AIRBUS | M | homozygous rf1, rf3, rf7 | T | G | G |
| ALHAMBRA | M | homozygous rf1, rf3, rf7 | G | T | G |
| ALIXAN | M | homozygous rf1, rf3, rf7 | T | T | C |
| AMADEUS | M | homozygous rf1, rf3, rf7 | G | G | C |
| ANAPURNA | M | homozygous rf1, rf3, rf7 | G | T | G |
| APACHE | M | homozygous rf1, rf3, rf7 | G | T | C |
| ARKEOS | M | homozygous rf1, rf3, rf7 | G | T | G |
| ARLEQUIN | M | homozygous rf1, rf3, rf7 | G | G | C |
| ARTDECO | M | homozygous rf1, rf3, rf7 | G | — | G |
| ARTURNICK | M | homozygous rf1, rf3, rf7 | T | T | G |
| ATOMO | M | homozygous rf1, rf3, rf7 | T | T | G |
| AVENUE | M | homozygous rf1, rf3, rf7 | T | T | C |
| CEZANNE | M | homozygous rf1, rf3, rf7 | G | T | G |
| CROISADE | M | homozygous rf1, rf3, rf7 | G | T | C |
| FRUCTIDOR | M | homozygous rf1, rf3, rf7 | G | T | G |
| GAZUL | M | homozygous rf1, rf3, rf7 | — | G | C |
| HERMANN | M | homozygous rf1, rf3, rf7 | T | G | G |
| HORATIO | M | homozygous rf1, rf3, rf7 | G | — | G |
| KALAHARI | M | homozygous rf1, rf3, rf7 | G | — | G |

TABLE 18
Haplotypes at the Rf4 locus for the restorer
lines L13 and R113 and maintainer lines.

| | R: restorer/ | | | |
|---|---|---|---|---|
| CODE | M: maintainer | Rf alleles | cfn0393953 | cfn0856945 |
| LGWR16-0016 | M | homozygous rf4 | T | T |
| LGWR16-0026 | M | homozygous rf4 | T | T |
| AIGLE | M | homozygous rf4 | T | T |
| AIRBUS | M | homozygous rf4 | T | T |
| ALHAMBRA | M | homozygous rf4 | T | T |
| ALIXAN | M | homozygous rf4 | T | T |
| AMADEUS | M | homozygous rf4 | T | T |
| ANAPURNA | M | homozygous rf4 | T | T |
| APACHE | M | homozygous rf4 | T | T |
| ARKEOS | M | homozygous rf4 | T | T |
| ARLEQUIN | M | homozygous rf4 | T | T |
| ARTDECO | M | homozygous rf4 | T | T |
| ARTURNICK | M | homozygous rf4 | T | T |
| ATOMO | M | homozygous rf4 | C | T |
| AVENUE | M | homozygous rf4 | T | T |
| Cezanne | M | homozygous rf4 | T | T |
| CROISADE | M | homozygous rf4 | T | T |
| FRUCTIDOR | M | homozygous rf4 | T | T |
| GAZUL | M | homozygous rf4 | — | T |
| HERMANN | M | homozygous rf4 | T | T |
| HORATIO | M | homozygous rf4 | C | T |
| KALAHARI | M | homozygous rf4 | T | T |
| L13 | R | homozygous Rf4 | C | G |
| R113 | R | homozygous Rf4 | C | G |

TABLE 19
Marker sequences and SNP position in sequence.
SEQUENCES OF SNP MARKERS

| Marker ID | AlleleX | AlleleY | Sequence |
|---|---|---|---|
| cfn0523072 | C | T | CAAAGGCTTGACAATGATAATGCCCCCGAATC |
| | | | TTG[C/T]GATAGACCTCATGCGCTAGAGTTGTT |
| | | | TTCCTCAAT |
| cfn0523109 | A | C | GACAAAGTTGAGGTGAACAAAACAGGCCTAC |
| | | | AATC[A/C]GCTAACTTACGTATATCCACATTAG |
| | | | CACACACCAC |
| 276I13_96B22_97797 | C | T | AAATTCGACAAGTACTATGGCTATGTCTCTGA |
| | | | ATG[C/T]TTGTTTGGTTTTATTTGTCTATATTGT |
| | | | CGTTGTAT |
| cfn0522096 | C | G | ATGCAAAGTAGTACTCGTAGAGAGTTAACACA |
| | | | GAC[C/G]AGTGATTTATTGGGTGGTATTCTACT |
| | | | TGATATTTG |
| cfn0527763 | T | C | ATAAAGAAAAGTAGAGGAAGCTTATGAATAA |
| | | | AATGGAAAAGGAATTCAAAATTGCCGATAAA |
| | | | TATAAAACTCATAACAAATCTAGCCACGCAAA |
| | | | TGCCCG[T/C]GCCGCTCTGCTCGTTTGTACATG |
| | | | TCTCGGTGGACAAGGAAGAACCCAACAATTGC |
| | | | ACAGGTCAATCTTATCCAGCAAAACAAGGAA |
| | | | GCAAACCAAACAGG |
| 104A4_105172 | TG | CA | ATGTTGCCTCTCGCTAGCCGCTGTCGMACCCA |
| | | | ATGAATAATGTT[TG/CA]TGGGTTCTGGCTCCG |
| | | | AGAGGATGGCCGGCTYCCC |
| 104A4_105588 | A | C | GTTCCTTGTGACATGTACTCATA[A/C]ACAAGA |
| | | | GCCATATACTCCCCATCCTTGCA |
| cfn0373248 | T | A | GACATAATGTGTAATAACAGCCCATAATGCAA |
| | | | TAAATATCAATATAAAAGCATGATGCAAAATG |
| | | | GACGTATCATTGCCACGRAAAAAATCTCACAA |
| | | | GATG[T/A]GACCATTTGATCCTCRTAATTGTTG |
| | | | TTCTAGACCCACTCCTAAGTMTAACATTCTTT |
| | | | ATGTCTATYCTTCAAATCCCGAAGAGTAATGA |
| | | | AAACTATCGAA |
| cfn1097828 | T | C | CCATGAGTACCCGCTACTATCGATCTCCCTCCT |
| | | | CCCTGTAGGAGGCCTACGAACGATGCCCTCAG |
| | | | GTCCTGCTTCCTCTCGGTAGCGATGGATCCAC |
| | | | CTG[T/C]GGTTGCTCTCTCAGGAACCAGTGTTG |
| | | | GCGGCGGCTCATCCGGGGCGCTGGATCTTGGT |
| | | | GATGTGCTGGAACAACTCAACTTGGAAGACGA |
| | | | AGAATTTGAT |
| cfn0527067 | A | G | GACAATATGATTCACCCTAGATCCTTCACCTT |
| | | | ACA[A/G]TTCGAAAAAAATAAAAGAACAAAAG |
| | | | TAATTTGACA |
| cfn0528390 | A | G | ACGAAGATGAGGAAGGTCTTCATGTTGGGTTT |
| | | | ATG[A/G]TTACTAATACTTGCTTGGAATAGATG |
| | | | TTTTTGATC |
| BWS0267 | A | G | GTTACCCCAATATGCTCCCTCCTTGCACATTTT |
| | | | CTTCAGCTGCATAAAAAMCAGAATACC[A/G]C |
| | | | ATCAGTTGCCTGAACCTTAACGCAGGTGCAGA |
| | | | AATAAGGCGACATAATTTYCACTAATC |
| cfn0527718 | C | T | AGGAAAATAAATTGTTCACAACATGGACATGA |
| | | | GAA[C/T]GGGGCAACCAAAAAGGGAAGAACAT |
| | | | TGGAGGAAAC |
| cfn0524469 | G | T | TTTGTACTGCACGTAGTAAGTATTGATTTTTCT |
| | | | GT[G/T]TGCTCTCTGTGGACTTAGATTTGAAAA |
| | | | TTGGCCTT |
| cfn0524921 | A | G | ATGCACATTGTTTCCATGTTAAGCTTATATTGT |
| | | | GC[A/G]TAACTCAAAAGATTGAAATGGAATTA |
| | | | CCAAAGGGC |
| cfn1122326 | C | T | ACTGACTGTTGGAATCTGATTAAGACGCTGGA |
| | | | GAA[C/T]CCGAGCCAAGATATGTCACGACTAG |
| | | | GCCATCTGGA |
| cfn1252000 | A | G | AATCAGATCCTGTTAATGCTGTAGCCATTCTTG |
| | | | CA[A/G]GCGACACCTTGTCCCAGTCGTCTTATG |
| | | | GGCACTTA |
| IWB14060 | A | G | GGCAGAGCCGGTCGACGGAGAGGAGCGCCAT |
| | | | TCGACGCGTCTTCCGCAAT[A/G]TGTTTGCCTG |
| | | | CTTCGGCCGCGGCCATTCGGCGAGCTCCCACG |
| | | | CTTCGTCC |
| cfn1249269 | A | G | CGTTTAAAAGAACACAAATGTGGCCCTAGTGA |
| | | | TCA[A/G]GTACACATATTTGTCACCTCTTTGAA |
| | | | TCTTACTTA |
| 219K1_166464 | C | T | CGGGCTGATGAGGCTCTCGACGTGCTGCTTCA |
| | | | CAGGATGCCTGAGCTGGGCTGCAC[C/T]CCCA |
| | | | ACGTGGTGGCATATACCACGGTCATCCACGGC |
| | | | TTCTTTAAGGAAGGC |
| 219K1_158251 | G | A | GCGCTATCCGGCGTCGTGTTCCCTCTTGGGGG |
| | | | AATCGTCCTGGAGATGGATCCGGTCA[G/A]AG |
| | | | GGGCCCGTGATTTGTGAGGATGTGTGTGTTGT |
| | | | TTCCCGAAAGGCG |
| 219K1_111446 | A | C | CTTTGACCTTAAATTCTTGTACTAATTTAGCAG |
| | | | AATCGTTCTTCGAGAAGCACTC[A/C]AAAAAT |
| | | | GGTTTGTCTTGGGTCTGTATCATATTTTCTCTG |
| | | | AACAAACAGGCGTGA |
| 219K1_110042 | T | C | GACTTAGCCTCACACGGAATCGAGTCAACCAA |
| | | | TTCC[T/C]GTCGGTTTTGAGTGGCTCCCTTGAA |
| | | | GATGCAATCGTTTTCAGCATGGTCAGATTAAT |
| | | | CAGCGAGCGTGC |
| 219K1_110005 | C | T | CATGTAGTGGCTGGCGTCTAAGCGCCTTTTCTT |
| | | | CTTCCAGCATCTA[C/T]GACTTAGCCTCACACG |
| | | | GAATCGAGTCAACCAATTCCTGTCGGTTTTGA |
| | | | GTGGCTCCCTTGAAGATG |
| 219K1_107461 | A | C | GTCGTATATATTGTTTGTATTAAAAAGTTGTGT |
| | | | GTTTTG[A/C]GTCATAATTTTTAAAATATTATT |
| | | | ATGTCATTTTCAAATTCGCATCAAC |
| 219K1_99688 | T | C | AATCTTCTTGACTTCATCCATCCGCCTTGTTGC |
| | | | CCTGCGCAAAATCAAACT[T/C]CCCCGTCCTTA |
| | | | TCATCAAGTCAGGTCCCGCCCTGGGCAGAGAG |
| | | | AG |
| 219K1_37 | C | T | CGGCAGATATCACAAAGGGCTATCCTGGTGAA |
| | | | CAA[C/T]AAGATGGGTCAGAATTTGATAATGA |
| | | | AGCCTCAAGCCC |
| cfn1270524 | A | T | AATAGATGCACGCATCGGCGACCATTTTTTAG |
| | | | TACTTTTTGCCTTTTTTGAAAATTTTGTCATTA |
| | | | AAAGACAAATGCCTAGTCTATACCTGATAAAC |
| | | | TAA[A/T]ATCATACATAGAGAAAATGGTCATTT |
| | | | GGTTGAGTTTCGGTACATGCTGAGATGGTTGC |
| | | | ACTTCGGTGCATCTGCTTTGCTTCCATCACATC |
| | | | ATAATGTCT |
| 136H5_3M5_7601 | T | C | GCTGCTTGTAGCGTCCCCCATGGCACCTG[T/C] |
| | | | GAAGAGGTTTTCGGCCACAGAGAAGGGGAAG |
| | | | GCTC |
| cfn1288811 | T | G | AAAATTACTTTTCACGCGCTTCGTTGGTCTGAC |
| | | | AGTGCGAGCATAATTTTACTTTTTCTCAGTTTT |
| | | | ACTTAATTTGGTTAACCAAATCCTTTTTGATTT |
| | | | T[T/G]AACTAGAAAACCGAATGTCAAACATTG |
| | | | TGCAAATTTGGAAACTGAAACTGAAACCAAA |
| | | | AACCTAAAAAAATGATTAGTTTGTTTTTTTGTT |
| | | | CTTGTTTCG |
| 136H5_3M5_89176 | A | G | gtatttCTTAGGATTTTCTCACCGGCATCTCC[A/G] |
| | | | TTTTTTGAGCAAGAGTATTTAAGGATGGTAGG |
| | | | C |
| 136H5_3M5_89263 | C | T | AACAAAGATGCTAGTAAGAACATGAACCTAG |
| | | | TTGCTCATTTTTAACAACAATTGCCCACCAACC |
| | | | TGACATGCTCTTCCCATGTTCTTTTTTTGCTCA |
| | | | AAA[C/T]AGAGATGCTAGTCCAAATATTTTTCT |
| | | | AGTTGCTTACATTTTAAACAACAATTGCCTAC |
| | | | CATCCTTAAATACTCTTGCTCAAAAAACGGAG |
| | | | ATGCCGGTGA |
| 136H5_3M5_138211 | T | A | AATACAGACTGGGTGCAAAGCCAAGATGAT[T/A] |
| | | | GTAAAATTGATTGATGGCCGTTGGGAGGT |
| cfn0556874 | C | T | TGTAAAGAAGCTTAACCAGGAAAGCTATCAG |
| | | | GGCCATAGGGAATGGCTGGTTAGTGACAATTT |
| | | | TGCCTGCTGGAAATGGGATTTCTTGTTTATTTC |
| | | | AGTT[C/T]TGCATTGTGTCTGACATGCTCTTTCT |
| | | | TTTGGGCGCAGGCTGAAGTGAATTACCTTGGA |
| | | | CAACTATCGCACCCGAATCTTGTAAAGCTCGT |
| | | | TGGGTACTGT |
| 136H5_3M5_64154 | T | C | TGGCGGAGCTGGGGCTGTTCCTCCTACGCAGG |
| | | | CGAAACTTCGCCGCGATAAA[T/C]GGAACTAT |
| | | | CATCAGGTTCCCCGATGATCCATACG |
| 136H5_3M5_68807 | A | G | ACAAGCAACCGAGACAAGTTGCTCTTAATTAT |
| | | | CTGTGCGT[A/G]CACCTCTAAGTCTTAACCTGA |
| | | | CGTAACCAACCAACCGTGT |
| 136H5_3M5_77916 | A | G | GATGGTTACAAGGCATGCATAGCAAGTAGAGT |
| | | | TAACTTATCAAGTTATT[A/G]GTATTTTTCTTCT |
| | | | GTGGTACTTAGAGTCTAMAGCTTGAGC |
| cfn1246088 | A | C | AATGGAAGCTGATGTGCGTTAGCGATAAAGCA |
| | | | ACAGCGATAACGACGCATGGATCACCATGCTA |
| | | | CTTGGGGAAGCAGGGACATCTGATGAGCCAG |
| | | | CATAC[A/C]CCCAGATATGTGTCTTTCCAAATT |
| | | | CCACGTCCCAACAGATGAGCTATAAATTAATG |
| | | | CCACCTTCCTCCTACAGCTAAATACTCCATCCG |
| | | | TTTCATAATGT |
| cfn1287194 | G | A | CAGAGGCATTCGTGAATTGGGCGAAATCAGA |
| | | | AGCAAGGAGCAGCGATGTTCAGCGCAGAAGG |
| | | | CACTGGGAGGGGATTCCAGGGAGGCTGCCCA |
| | | | CCAGCCC[G/A]CCATCAGATACGGAGGAGGTG |
| | | | GATCCATGGCCCTACCTGTGTCCTGCGCCGAA |
| | | | TCTGGACTGTGGTAACTACAGCGCCTGAATCT |
| | | | AGAGGTTCAGCCTGG |
| cfn1258380 | A | C | GATCCATCTCCCTTAATAATTTTGCTATTGGTA |
| | | | TTGGGTATGGACATCTGAAGTGAAGGTTACGG |
| | | | CCGATTTATAGGAGTGATAGCACCACACAATT |
| | | | CAT[A/C]AGAGCATCTGCAATAGATGAGTAGA |
| | | | TGTAAAACTACTTAACTTTTACATCTCCGGGCC |
| | | | TAAAAACGCATCTGTAATAAGATAATGTAGAT |
| | | | GTAAAGAAAA |
| IWB72107 | A | G | CGACGACGACGAGGATGCCGAGTTTGATGAC |
| | | | ATGGAGGATTATATCGACG[A/G]cgcggactgggacg |
| | | | ccgacatgtatgatgatgtgttcgatgtctgaagga |
| BS00090770 | C | T | TAGCCGTAGGTCGTAGCACATAGCCGTTTA[C/T] |
| | | | GTAATGCATAGTTGTCCGAAGGAATGTTTC |
| cfn1239345 | A | G | TAACCTGGGGCTTCTTTTTTCTCCCTATAATAT |
| | | | GG[A/G]CTGCCCTTTTAAGAAGGAACTGCAGC |
| | | | GAGGGTGCA |
| cfn0917304 | G | T | GACTACGCGTTCCTCCCGGTGGTGGCGCTCTA |
| | | | CCC[G/T]TTGTGTTGCCTTTCTCCAAGCAGTTGT |
| | | | GCCCTTCG |
| cfn0919993 | G | T | ATATCTTTACAAGTCATCGACTTACATGCTTCT |
| | | | TT[G/T]TATTATATGCACCTATGCAGTACTTGTT |
| | | | AATGGGT |
| cfn0920459 | C | G | GATGATATAACCGTAGCCAAGGAAGCCCAGA |
| | | | TTTT[C/G]TTCTGTGTATCTATAGGAGCTTAATT |
| | | | AGGAGGAGG |
| cfn0393953 | C | T | AGTATATAAAAAAACAAGTTGTCACCCAGATG |
| | | | AAT[C/T]CGAAACTATGTCAATGTCGACGGTGA |
| | | | GTGTGGACC |
| cfn0856945 | G | T | GGACATCGGCACATGCTTTATTACTGATCTGA |
| | | | TTT[G/T]TTGACTGTTTATTTTAGGTTTGCCTAC |
| | | | ACCACTGA |
| cfn1291249 | T | G | ATGGTTGAATATGTGACTGCATTTGGACTCAC |
| | | | TCCTTGTTTCTGCATTTCATTGAAGATAAGCAT |
| | | | GGCCTTATCAAGCTTCCCAGATTTAGCATGTG |
| | | | CAT[T/G]AATCAGTATGTTGAAGATACGACAGT |
| | | | CAGGTAGAATGCAGTATCTTTCCATTGAATTG |
| | | | AAGAGATTAATCATATCAACTAAGCATCCTTC |
| | | | GGTGGCATAC |
| cfn0231871 | G | T | GGAGGCGCCTACTGTATTAAATTAGCTAGTGT |
| | | | GGC[G/T]TGTTTGAGGATAATGGCACATATACC |
| | | | TTGGCGGTG |
| cfn0867742 | G | T | TCCAGGCAGGGGGCATCCTCGACAATGATTTC |
| | | | ATC[G/T]AAGCTGCATCCCCATTCCATCACGAC |
| | | | GCGGAGGCT |
| cfn0523990 | G | T | TGTAAGCTAACTATACATGAAGAGTGCAGGCA |
| | | | CAC[G/T]AAAACGTTCATCCTGAAGTACAAGA |
| | | | GTTATTTTGG |
| cfn3126082 | A | C | GGAGAAAGGCGAGATTTTAGCACCTAACGCC |
| | | | GCAA[A/C]CCAGATCAAATCGCTGTCCCTTT |
| W90K_RAC875_ | A | G | AACCTTGGAAGCTATCATTGCGCACTTGAAGA |
| c33564_120 | | | GCA[A/G]TAGTGTGGACATTCCTGTTTATGCTT |
| | | | GGAGCTTAG |
| cfn3407185 | A | G | CGCAGGCAGCGGGCATGTATCCTCGTCTGACG |
| | | | GAT[A/G]CCCAGATTATTAAACTGTCACCCTGC |
| | | | ACGCCTGCA |
| S100069923 | G | A | GAGGCTAATCCCGACGTGCCACATTGAGCACG |
| | | | TGTGTTCTTGCTGTGGCCTGGTCGAAAGACAT |
| | | | GACGCATGCACGTGCCCCACGCCTCACACGGC |
| | | | TTGGGTTCTCGCCTGTCCGGTGCTCGACGGAC |
| | | | CAGTACATATACGCGAGCGCTCCT[G/A]GCCA |
| | | | CCTCAGTTCATCACACTTCACTGCAGTACAAG |
| | | | GCCTCGGCTCTCGGCAGACTCCTCATTGCTGCT |
| | | | TCTGCTAGTGAAAAGAGAGATTCTTCAGCGCT |
| | | | GCTCCTGAAAGAGATAAGAAATACGATGGCA |
| | | | ACAATGGTCAGAG |
| S3045171 | G | A | ACTTACTGCGCGCAGACGTTGCAGCTCTTCCT |
| | | | GCAGAAGCCAGGAGCTTCCTTGGTGCCCACCA |
| | | | TATAGTTGGGGTTCTTGGCACACTCCCCA[G/A] |
| | | | CGGCAGCCCACTGCGAGCAGAGGACATTCTCG |
| | | | TCCTCGCAGCCGTCACCGGAGCCT |
| S3045222 | T | C | AAGCAAGCTACGCGTTGCTCAAAAAAAAAAA |
| | | | AAGCAAGCAAGCTACGCTGATCAAAGGCTGA |
| | | | ATAGTCCAGAGTTACAGGACATGGCTACTCTG |
| | | | CAGC[A/G]CCCAGCAAGCTTACTACTTAGGTTG |
| | | | GTGGAGAAGCAGCACCCACTCGAGACTCGAC |
| | | | AAGCAACCTTGGACGTTCTACTCGCCAGTGCA |
| | | | TTGCTGCTTTACC |
| cfn1087371 | A | G | ACCAGAGAAAGAGAGGGGAACTTTGGGTATA |
| | | | CACC[A/G]CATTACCCTAGTGAAAGAAGAAGG |
| | | | GGGTATTATGT |
| cfn0436720 | A | G | GAAGGGTCCACTGAGAATTAAGGATGCATTCT |
| | | | TTC[A/G]ATTTGGTATATTTGTTGTAAGGAATG |
| | | | AAGAATCGG |
| S100067637 | G | C | TTTCGTGGCGGGGGATCTCGTGCCGGTCGAGG |
| | | | AGGTCCACCTCCAGCGAATTCTGCAGCAACCA |
| | | | ACACAAACAGGCCCAAATGTCCGAATTCAGA |
| | | | GCA[C/G]AGCCCGACCGACCGACCGCGAAATC |
| | | | GCGCGGCATGGCGTTGGCGTTTGGCGTTGGCG |
| | | | AGAAGGAAAAAGGCACTCTATGCAGACCTTA |
| | | | GCTTGGTTATGGC |
| cfn0554333 | C | G | TTGCCAAATTCACACCATCATTGATCTGGGGT |
| | | | ATC[C/G]TATGCCTATGTGATGCCTCTCACCTC |
| | | | TTTCTTCCC |
| cfn0238384 | C | G | CCGTGAAACCTGTAAAAAGATGTCTGTGTGTC |
| | | | TAG[C/G]AAAGCCCTAATTTTAATCACCCCGTA |
| | | | CGCCCCCCT |
| cfn0530841 | C | T | GCAGCTTCTTGTTTATATATTCTCTTATCAGAA |
| | | | GT[C/T]GGGTAGAACAGCTAACGATGTGCTGCT |
| | | | CATTTCCT |
| cfn1082074 | C | T | TGATCTTACTGATAAAATCCGGTTCAAATATA |
| | | | TAA[C/T]GGTGAGAAAAAATTAACCAGAGCGA |
| | | | GGCGAGACAT |
| cfn0560679 | C | T | GTTCATGTACAATGATGTTTAACATTGGAACG |
| | | | GTC[C/T]GGGATCTGTTTGATCTATGCCCCCTT |
| | | | CAACGTCTT |
| cfn0915987 | G | T | AAGTCTGCCATCCAGATCATTACCCAACGGCC |
| | | | AAT[G/T]GAGCCATGAGGTTTGCCTCGTTGCAC |
| | | | GTTTTGGCT |
| cfn0920253 | A | C | GCAACAAAGCTGGTCATCCAAACATTTACATC |
| | | | GTT[A/C]GGCAGGCTTTCCGCCCAAACCATGCG |
| | | | GCCGACCTG |
| cfn0448874 | C | T | TATGTAAAACCTCTTTGTTTCTAAATAGCTGCG |
| | | | GC[C/T]CGCTACCTAAATTTATGTTGAACCTAG |
| | | | AGGCACCC |
| cfn0923814 | A | C | GTTCGGCAGAATCCAAGTCGCAAATGTAAGGT |
| | | | CAG[A/C]AAATGAATGATGATCATGATAATGA |
| | | | AAATCATAAG |
| cfn0924180 | A | G | ACGTATGGAGCTTCCTCTTTTCATCATGCACCA |
| | | | TT[A/G]TGATCTCCCTCTTATTTTGTCTGAAGCC |
| | | | ATTCATG |
| cfn0919484 | A | G | AGGTCATGAAAATGCAAGTGGCGAATCTTATC |
| | | | TCT[A/G]TTATACCATTTGGCAAAACAAAGGCG |
| | | | AGAGTTCTG |

### Example 19: Test of the Cumulative Effect of Rf Genes

[0476] To test the hypothesis of the cumulative effect of the restorer alleles and to identify the combination(s) of Rf genes that can produce a full fertility in the CMS hybrid, the SNPs linked to the 4 major loci mapped are used to create restorer lines combining the different restoring alleles. The 2 Rf alleles, 3 Rf alleles and 4 Rf alleles combinations (Rf1+Rf3, Rf1+Rf4, Rf1+Rf7, Rf3+Rf4, Rf3+Rf7, Rf4+Rf7, Rf1+Rf3+Rf4, Rf1+Rf3+Rf7, Rf3+Rf4+Rf7 and Rf1+Rf3+Rf4+Rf7) can be created employing different breeding techniques such as pedigree breeding, backcross, single-seed descent or double haploid.

[0477] In the example exposed 2 double-haploid lines from the cross TJB155/R204 were created: LGWR16-0016 and LGWR16-0026. Those two lines carry the restorer alleles Rf1, Rf7 (donor R204) and Rf3 (donor TJB155) and are alloplasmic for the cytoplasm from T. timopheevii (donor TJB155).

[0478] LGWR16-0016 and LGWR16-0026 have winter growth habits and show a normal fertility (LGWR16-0016: 2.54 seeds/spikelet, average over 29 individual spikes. LGWR16-0026: 2.33 seeds/spikelet, average over 40 individual spikes). LGWR16-0016 and LGWR16-0026 were used as pollinators in a series of crosses onto a series of A-line with elite background (14 A-lines for LGWR16-0016 and 16 A-lines for LGWR16-0026). The F1 plants originating from those crosses were assessed indoor for their fertility.

[0479] Fertility Assessment with the Main Tillers

[0480] The spikes from the hybrids produced with the restorer lines LGWR16-0016 yielded on average 45.4 grains and did show an average fertility of 2.44 grains/spikelet. The spikes from the hybrids produced with the restorer lines LGWR16-0026 yielded on average 44.7 grains and did show an average fertility of 2.37 grains/spikelet. Neither of these two groups differ significantly in their fertility distribution from the group formed by the elite lines (Table 20. T-test, P-values <0.05). The distribution of the fertility scores are, as a consequence, relatively similar between groups (see Table 20)

TABLE 20
fertility (expressed as number of seeds/spikelet) of a series
of spikes from hybrids produced with the restorers lines LGWR16-
0016 and LGWR16-0026 and from a panel of elite lines. The average
number of seeds per spike are indicated in the column “SEEDS”. The
standard deviation “STD. DEV.” are given for each of
the three groups. The T-test p-value “P-Value” is given
for the two groups of hybrids produced with LGWR16-0016 and
LGWR16-0026: it indicates the statistical significance of the
difference for the value “Fertility” between the group
of hybrids ad the group of elite lines The spikes originate
from the tallest tiller(s).

| | | | | STD. | P- |
|---|---|---|---|---|---|
| | SPIKES | SEEDS | FERTILITY | DEV. | VALUE |
| LGWR16-0016 | 164 | 45.4 | 2.44 | 0.43 | 0.090 |
| LGWR16-0026 | 206 | 44.7 | 2.37 | 0.45 | 0.692 |
| ELITES inbred | 637 | 44.1 | 2.36 | 0.59 | |

[0481] Fertility Assessment with all Tillers from F1 Plants

[0482] To be considered as complete, the restoration of fertility has to be observed in all the spikes formed by the hybrid plant. For that purpose, the integrality of the spikes of 56 F1 plants produced with LRWG16-0016, of 61 F1 plants produced with LGWR16-0026 and of 52 elite lines were assessed for their fertility and represent, per group, 294, 262 and respectively 288 individual spikes (Table 21). The 56 F1 plants produced with LGWR16-0016 produced on average 41.4 grains/spikes and did show an average fertility of 2.21 grains per spikelet (standard deviation 0.32). The 61 F1 plants produced with LGWR16-0026 produced on average 42.8 grains/spikes and did show an average fertility of 2.27 grains per spikelet (Table 5. Standard deviation 0.32). The fertility distribution of these two groups differ significantly from the fertility distribution of the groups formed by the elite lines (average number of seeds per spike: 38.4. Average fertility: 2.01. Standard deviation 0.44. see Table 21).

TABLE 21
average spike fertility (expressed as number of seeds/spikelet)
of individual plants from hybrids produced with the restorers
lines LGWR16-0016 and LGWR16-0026 and from a panel of elite
lines. The average number of seeds per spikes are indicated
in the column “SEEDS”. The standard deviation “STD.
DEV.” are given for each of the three groups. The T-test
p-value “P-Value” is given for the two groups of hybrids
produced with LGWR16-0016 and LGWR16-0026: it indicates the
significance of the statistical difference for the value “Fertility”
between the group of hybrids ad the group of elite lines. On
average the F1 plants produced with the restorer lines LGWR16-
0016 and LGWR16-0026 formed 5.25 and respectively 4.3 spikes
and the plants from the elite lines group formed on average 4.35 spikes.

| | | | | STD. | P- |
|---|---|---|---|---|---|
| | PLANTS | SEED | FERTILITY | DEV. | VALUE |
| LGWR16-0016 | 56 | 41.4 | 2.21 | 0.32 | 0.003 |
| LGWR16-0026 | 61 | 42.8 | 2.27 | 0.32 | 0.000 |
| ELITES inbred | 52 | 38.4 | 2.01 | 0.44 | |

### Example 20: Development of Restorer Lines from Different Sources

[0483] With the help of the markers developed in the previous examples, new restorer lines comprising Rf1, Rf3 and Rf7 loci were obtained using different sources of restoration locus. Table 22 shows the list of these restorer lines and their characteristics.

[0484] LGWR17-0015 is a winter wheat double haploid line produced from the F1 plants from a complex cross: R0934F was first pollinated by Altigo, the created F1 R0934F/Altigo was then crossed with the F1 R197/Apache taken as male and the resulting four ways F1 “R0934F/ALTIGO/R197/APACHE” was then pollinated with the line Altamira. LGWR17-0015 inherited the T-CMS cytoplasm from the restorer line R0934F. LGWR17-0015 has been selected under local environment and is a fully fertile wheat line.

[0485] LGWR17-0022 and LGWR17-0157 are winter wheat double haploid lines arising from a complex cross: the F1 formed from the cross between the restorer lines R204 and R213 was pollinated with Aristote, the resulting 3-ways cross “R204/R213//Aristote” was then pollinated with the line NIC07-5520. LGWR17-0022 and LGWR17-0157 inherited the T-CMS cytoplasm from the restorer line R204. They have both been selected under local environment and are fully fertile wheat lines.

[0486] LGWR17-0096 and LGWR17-0154 are winter wheat lines developed by conventional pedigree breeding technique from the 3-ways cross R204/R213//ARISTOTE. LGWR17-0096 and LGWR17-0154 inherited the T-CMS cytoplasm from the restorer line R204. They have both been selected under local environment and are fully fertile wheat lines.

[0487] All lines have been genotyped with the markers as described above to check for the presence of Rf1, Rf3 and Rf7 haplotypes.

[0488] Representative seed samples for each line have been deposited before NCIMB collection.

TABLE 22
Full restorer lines data regarding pedigree, the process of selection,
Rf haplotype identified by markers and NCIMB deposit number“HD”: homozygous
plant obtained after a Double Haploid process, “F6”: homozygous
plant obtained through six generations of self-crosses.

| | | | | NCIMB |
|---|---|---|---|---|
| | | | | deposit |
| CODE | PEDIGREE | SELECTION | HAPLOTYPE Rf | number |
| LGWR16- | TJB155/R204 | HD | Rf1 + Rf3 + Rf7 | NCIMB |
| 0016 | | | | 42811 |
| LGWR16- | TJB155/R204 | HD | Rf1 + Rf3 + Rf7 | NCIMB |
| 0026 | | | | 42812 |
| LGWR17- | R0934F/ALTIGO//R197/ | HD | Rf1 + Rf3 + Rf7 | NCIMB |
| 0015 | APACHE///ALTAMIRA | | | 42813 |
| LGWR17- | R204/R213//ARISTOTE/// | HD | Rf1 + Rf3 + Rf7 | NCIMB |
| 0022 | NIC07-5520 | | | 42814 |
| LGWR17- | R204/R213//ARISTOTE | F6 | Rf1 + Rf3 + Rf7 | NCIMB |
| 0096 | | | | 42815 |
| LGWR17- | R204/R213//ARISTOTE | F6 | Rf1 + Rf3 + Rf7 | NCIMB |
| 0154 | | | | 42816 |
| LGWR17- | R204/R213//ARISTOTE/// | HD | Rf1 + Rf3 + Rf7 | NCIMB |
| 0157 | NIC07-5520 | | | 42817 |

### Example 21: Test of the Cumulative Effect of Rf1, Rf3 and Rf7 Genes Outdoor

[0489] Fertility from 4 hybrids produced with the restorer lines LGWR17-0022, LGWR17-0153, LGWR17-0154 and LGWR17-0157 was assessed in field as described in example 19 for the fertility assessment of the main tillers. The restorer lines have the pedigree and haplotypes as described in table 23.

[0490] The assays are made with agronomically adapted hybrids in three different countries France, Germany and United Kingdom. In total 28 hybrids are tested and compared to 26 control Elite inbreds. The result show that, in the field, the hybrids comprising the combination of the three alleles Rf1, Rf3 and Rf7 restorers performed as well as the elite inbreds (table 24). It is also worth to be noted that, in this combination, the Rf3 weak or Rf3 do not have any impact on the fertility level.

TABLE 23
pedigree and haplotype of the restorer lines

| | | | NCIMB |
|---|---|---|---|
| CODE | PEDIGREE | HAPLOTYPE Rf | deposit |
| LGWR17-0022 | R204/R213//ARISTOTE///NIC07- | Rf1 + Rf3 + Rf7 | yes |
| | 5520 | | |
| LGWR17-0153 | R204/R213//ARISTOTE | Rf1 + Rf3weak + Rf7 | no |
| LGWR17-0154 | R204/R213//ARISTOTE | Rf1 + Rf3weak + Rf7 | yes |
| LGWR17-0157 | R204/R213//ARISTOTE///NIC07- | Rf1 + Rf3 + Rf7 | yes |
| | 5520 | | |

TABLE 24
fertility (expressed as number of seeds/spikelet) of a series
of spikes from hybrids produced with the restorer lines
LGWR17-0022, LGWR17-0153, LGWR17-0154 and LGWR17-0157 and
from a panel of elite lines. Each spike originates from
the tallest tiller. The standard deviation “STD. DEV.”
are given for each of the three groups.

| | | | Fertility | |
|---|---|---|---|---|
| | | SPIKES | average | STD DEV. |
| Hybrids | Total | 169 | 2.71 | 0.47 |
| | Rf1 + Rf3weak + Rf7 | 43 | 2.72 | 0.38 |
| | Rf1 + Rf3 + Rf7 | 126 | 2.71 | 0.49 |

| | | | |
|---|---|---|---|
| Elite inbreds | 226 | 2.73 | 0.43 |

### Example 22: Modification of the Endogenous RFL29c Gene Sequence by CRISPR Technologies to Revert a Rf3 Allele to a Rf3 Allele

[0491] As shown in example 11, FIG. 5A and FIG. 12, RFL29c nucleotide sequence is characterized by a deletion of 2 nucleotides compared to RFL29a nucleotide sequence creating a frameshift and resulting in an inactive truncated protein. The sequence alignment in FIG. 12 shows that one “T” nucleotide in the RFL29c gene sequence could be removed or 2 nucleotides added in order to reframe the RFL29c gene sequence into a complete and functional RFL29 protein.

[0492] Such modification could be achieved in Fielder, which comprises a RFL29c as depicted in SEQ ID NO 3457, by designing, as described in example 15, a suitable guide sequence targeting the frameshift and used it in combination with a base-editing technology such as described in WO2015089406. FIG. 12 shows suitable PAM motif and target sequence for CRISPR cas9 edition.

### BIBLIOGRAPHY

[0493] Ahmed et al, 2001. QTL analysis of fertility restoration against cytoplasmic male sterility in wheat. Genes Genet Syst, 76:33-38.
[0494] Bahl P N, Maan S S, 1973. Chromosomal location of fertility restoring genes in six lines of common wheat. Crop Sci 13: 317-320.
[0495] Bennetzen J L et al, 2012. Reference genome sequence of the model plant Setaria. Nat Biotechnol 30 (6):555-+. doi:10.1038/nbt.2196
[0496] Brenchley R, et al, 2012. Analysis of the bread wheat genome using whole-genome shotgun sequencing. Nature 491 (7426):705-710. doi:10.1038/nature11650
[0497] Cannarozzi G, et al, 2014. Genome and transcriptome sequencing identifies breeding targets in the orphan crop tef (Eragrostis tef). Bmc Genomics 15. doi:Artn 58110.1186/1471-2164-15-581
[0498] Chen J F et al, 2013. Whole-genome sequencing of Oryza brachyantha reveals mechanisms underlying Oryza genome evolution. Nature Communications 4. doi:ARTN 159510.1038/ncomms2596
[0499] Cheng S F, Gutmann B, Zhong X, Ye Y T, Fisher M F, Bai F Q, Castleden I, Song Y, Song B, Huang J Y, Liu X, Xu X, Lim B L, Bond C S, Yiu S M, Small I (2016) Redefining the structural motifs that determine RNA binding and RNA editing by pentatricopeptide repeat proteins in land plants. Plant Journal 85 (4):532-547. doi:10.1111/tpj.13121.
[0500] Christensen A H and Quail P H, 1996. Ubiquitin promoter-based vectors for high-level expression of selectable and/or screenable marker genes in monocotyledonous plants. Transgenic Res, May; 5(3):213-8.
[0501] Christian et al, 1992. Maize polyubiquitin genes: structure, thermal perturbation of expression and transcript splicing, and promoter activity following transfer to protoplasts by electroporation. Plant Mol Biol. 18(4):675-89.
[0502] Curtis and Lukaszewski, 1993. Localization of genes in Rye that restore male fertility to hexaploid wheat with timopheevii cytoplasm. Plant breeding, 11:106-112.
[0503] Depigny-This D et al, 1992. The cruciferin gene family in radish. Plant Molecular Biology, 20: 467-479.
[0504] Fehr W R et al, 1987. Principles of Cultivar Development Vol. 1 Theory and Technique. Macmillan, New York..
[0505] Fujii S, Bond C S, Small I D (2011) Selection patterns on restorer-like genes reveal a conflict between nuclear and mitochondrial genomes throughout angiosperm evolution. P Natl Acad Sci USA 108 (4):1723-1728. doi:DOI 10.1073/pnas.1007667108.
[0506] Geyer M et al, 2016. Distribution of the fertility-restoring gene Rf3 in common and spelt wheat determined by an informative SNP marker. Mol Breeding, 36:167. DOI 10.1007/s11032-016-0592-6.
[0507] Götz H et al, 2011. Transgene Expression Systems in the Triticeae Cereals. Journal of Plant Physiology 168, no. 1: 30-44. doi:10.1016/j.jplph.2010.07.007.
[0508] International Brachypodium I (2010) Genome sequencing and analysis of the model grass Brachypodium distachyon. Nature 463 (7282):763-768. doi:10.1038/nature08747
[0509] Jacquemin J, et al, 2013. The International Oryza Map Alignment Project: development of a genus-wide comparative genomics platform to help solve the 9 billion-people question. Curr Opin Plant Biol 16 (2):147-156. doi:10.1016/j.pbi.2013.02.014.
[0510] Jefferson, R. A., 1987. Assaying chimeric genes in plants: The GUS gene fusion system. Plant Mol. Biol. Report. 5, 387-405. DOI:10.1007/BF02667740
[0511] Jia J, et al, 2013. Aegilops tauschii draft genome sequence reveals a gene repertoire for wheat adaptation. Nature 496 (7443):91-95. doi:10.1038/nature12028.
[0512] Jones H D, 2015. Wheat Biotechnology: Current Status and Future Prospects. K. Azhakanandam et al. (eds.), Recent Advancements in Gene Expression and Enabling Technologies in Crop Plants, DOI 10.1007/978-1-4939-2202-4_8.
[0513] Kay R, et al 1987. Duplication of CaMV 35S promoter sequences creates a strong enhancer for plant genes. Science 236:1299-1302.
[0514] Kawahara Y et al, 2013. Improvement of the Oryza sativa Nipponbare reference genome using next generation sequence and optical map data. Rice 6. doi:Artn 410.1186/1939-8433-6-4.
[0515] Kihara, 1951, Genome analysis in Triticum and Aegilops X. Concluding review. Cytologia, 16: 101-123.
[0516] Kojima et al, 1997, High-resolution RFLP mapping of the fertility restoration (Rf3) gene against Triticum timopheevii cytoplasm located on chromosome 1BS of common wheat. Genes Genet Syst, 72: 353-359.
[0517] Krasileva K V et al, 2013. Separating homeologs by phasing in the tetraploid wheat transcriptome. Genome Biol 14 (6). doi:ARTN R66 10.1186/gb-2013-14-6-r66.
[0518] Li et al, 2003. OrthoMCL: Identification of Ortholog Groups for Eukaryotic Genomes. Genome Res. 2003 September; 13(9): 2178-2189.
[0519] Li H. and Durbin R, 2010. Fast and accurate long-read alignment with Burrows-Wheeler Transform. Bioinformatics, Epub. [PMID: 20080505]
[0520] Ling H Q et al, 2013. Draft genome of the wheat A-genome progenitor Triticum urartu. Nature 496 (7443):87-90. doi:10.1038/nature11997
[0521] Longin et al, 2012, Hybrid breeding in autogamous cereals. Theor Appl Genet.: 125:1007-1096. DOI 10.1007/s00122012-1967-7.
[0522] Ma Z Q and Sorrells M E, 1995, Genetic analysis of fertility restoration in wheat using RFLP. Crop Sci., 35:1137-1143.
[0523] Mace E S et al, 2013. Whole-genome sequencing reveals untapped genetic potential in Africa's indigenous cereal crop sorghum. Nat Commun 4:2320. doi:10.1038/ncomms3320.
[0524] McElroy D et al, 1990. Isolation of an Efficient Actin Promoter for Use in Rice Transformation. The Plant Cell, Vol. 2, 163-171.
[0525] Martis M M et al, 2013. Reticulate Evolution of the Rye Genome. Plant Cell 25 (10):3685-3698. doi:10.1105/tpc.113.114553
[0526] Mayer K F X, et al, 2014. A chromosome-based draft sequence of the hexaploid bread wheat (Triticum aestivum) genome. Science 345 (6194). doi:ARTN 125178810.1126/science.1251788
[0527] Mayer K F X et al, Conso IBGS, 2012. A physical, genetic and functional sequence assembly of the barley genome. Nature 491 (7426):711-+. doi:10.1038/nature11543.
[0528] Ouyang S et al, 2007. The TIGR Rice Genome Annotation Resource: Improvements and new features. Nucleic Acids Res 35:D883-D887. doi:10.1093/nar/gk1976.
[0529] Pallavi Sinha P et al 2013. Genetic analysis and molecular mapping of a new fertility restorer gene Rf8 for Triticum timopheevii cytoplasm in wheat (Triticum aestivum L.) using SSR markers. Genetica, 141: 131-141.
[0530] Paterson A H et al, 2009. The Sorghum bicolor genome and the diversification of grasses. Nature 457 (7229):551-556. doi:10.1038/nature07723.
[0531] Rathburn and Hedgcoth, 1991. Chimeric open reading frame in the 5′ flanking region of coxI mitochondrial DNA from cytoplasmic male-sterile wheat. Plant Mol. Biol., 16:909-912.
[0532] Rice P et al, 2000. A. EMBOSS: The European molecular biology open software suite. Trends Genet 16, 276-277, 10.1016/S0168-9525(00)02024-2.
[0533] Sakai H, et al, 2013. Rice Annotation Project Database (RAP-DB): An Integrative and Interactive Database for Rice Genomics. Plant Cell Physiol 54 (2):E6-+. doi:10.1093/pcp/pcs183.
[0534] Schnable P S, et al, 2009. The B73 Maize Genome: Complexity, Diversity, and Dynamics. Science 326 (5956):1112-1115. doi:10.1126/science.1178534.
[0535] Singh S K et al, 2010. Perspective of hybrid wheat research: a review. Indian J Agric Sci 80:1013-1027.
[0536] Song and Hedgcoth, 1994. Influence of nuclear background on transcription of a chimeric gene orf256 and cox1 in fertile and cytoplasmic male sterile wheats. Genome, vol. 37
[0537] Stojalowski S et al, 2013. The importance of chromosomes from the sixth homeologic group in the restoration of male fertility in winter triticale with Triticum tomopheevii cytoplasm. J. Appl. Genetics, 54:179-184.
[0538] Verdaguer et al, 1996. Isolation and expression in transgenic tobacco and rice plants, of the cassava vein mosaic virus (CVMV) promoter. Plant Molecular Biology 31: 1129-1139.
[0539] Wang M H et al, 2014. The genome sequence of African rice (Oryza glaberrima) and evidence for independent domestication. Nat Genet 46 (9):982-+. doi:10.1038/ng.3044Wilson J A, Ross W M. 1962. Male sterility interaction of the Triticum aestivum nucleus and Triticum timopheevii cytoplasm. Wheat Information Service (Kyoto) 14: 29-30.
[0540] Wilson J A, Ross W M. 1962. Male sterility interaction of the Triticum aestivum nucleus and Triticum timopheevii cytoplasm. Wheat Information Service (Kyoto) 14, 29-30.
[0541] Wilson, 1984. Hybrid wheat breeding and commercial seed development. Plant Breeding Rev., 2: 303-319.2
[0542] Whitford R et al, 2013. Hybrid breeding in wheat: technologies to improve hybrid wheat seed production. Journal of Experimental Botany. doi:10.1093/jxb/ert333.
[0543] Zhou et al, 2005. SSR marker associated with fertility restoration genes against Triticum timopheevii cytoplasm in Triticum aestivum. Euphytica, 141:33-40.

The application's sequence listing, which the Patent Office published only in electronic form, follows.

SEQUENCE LISTING (3457 sequences)

SEQ ID NO: 1 - protein, 983 aa, Triticum aestivum
MLTNIGILKKIIPFYGFCGAFSRACNKFIFLVDIKFYSYRLGDTNIHIIILLYLKRTHILSLYQNIGRLYTWKSTRLAPISRPTTTKAMPRFSSTTPMSPLRLRLRRRLRARHSSSTSHSSRSWEPHAAFAAATERARSGNLTPEDAHHLFDELLRQGNPVQDRPLNKLLSALARAPASAACRNGPALAVALFSRISQGARRRVAEPTACTYTILMDCCCRAHRLDLALAFFGRLLRTGLKTGVIEVNTLLKGLCHSKRADEAMEVLLHRMPELGCTPDVVACNTVIHGFFKEGQVGKACNLFHEMGQHGVTPDVVTYNSVIDGLCKARAMDKAEVVLHQMLVNGVVPDKVTYGSLIDGYYSLAHWKEAVRLFEEMKSQRVTPDVHTYNLCIHGFFREGQVGKACNLFHEMGQQGVTPDVVTYNSVIDALCKARAMDKAEYFLRQMVDSGVVPNNVTYNSLIHGYSSSGYQKEAVRVLKEMTSQGIIPDVFTFNSLMASLSKNGRSKEAAEIFDSMAMKGLKPDIVSYNTLLHGYATEGCLVGMTNFFNSMTRDGIRPNCHTLNILINAYAKSGMMDEAMVIFKGMRKQGVSPDVVTYSTVIHGFCKIGRLDNAMVKFKQMTDMGVRPNPIVYHSLIQGFCTHGDLVKAKELVTEMRYKGMRPPDIKVFHLAMQNLCTEGRVTKARDILDLIVHIGMRPDVFTFSLLIGGYCLVCKMEDASKIFDDMVSYGLEPSNITYGILINGYCKNKRIDDGLILFKTMLHKGLKPTTFNYNVILDGLFLAGRTVAAKEKFNEMVESGVSVCIDTCSIVLGGLCKNSCSSEAITLFRKLSTMNVKFDINIVNIIIGAFYSVKRNQEAKDLFAAIPANGLVPNAVTYTIMMTNLIKEGSVEEADNLFLSMEKSGCTANSWMLNHIIRRLLERGEIVKAGNYMSKVDVKSYSLEAKTVSLLISLFSREGKYRDHIKLLPTKYQFLEEAATVE

SEQ ID NO: 2 - protein, 440 aa, Triticum aestivum
MTNLFNSMTRDGIRPNCHTLNILINAYAKSGMMDEAMLIFKGMRKQGVSPNVVTYSTVIHGFCKIGKLDNAMVKFKQMTDMGVRPNPIVYHSLIQGFCTHGDLVKAKELVTEMRYKGMRPPDIKVFHLAMQNLCTEGRVTKARDILDLIVHIGMRPDVFTFSILIGGYCLVCKMEDASKIFDDMVSYGLEPSNITYGILINGYCKNKRIDDGLILFKTMLHKGLKPTTFNYNVILDGLFLAGRTVAAKEKFNEMVESGVSVCIDTCSIVLGGLCKNSCSSEAITLFRKLSTMNVKFDINIVNIIIGAFYRVKRNQEAKDLFAAIPANGLVPNAVTYTIMMTNLIKEGSVEEADNLFLSMEKSGCTANSWMLNHIIRRLLERGEIVKAGNYMSKVDVKSYSLEAKTVSLLISLFSREGKYRDHIKLLPTKFQFLEEAATVE

SEQ ID NO: 3 - protein, 917 aa, Triticum aestivum
MRSCFCNRAFIAGCNEWACGAWTLHRTAISSCIQRSSRRRSKHRPGDLLQVTRTTILGRRREYVFVIKKKRVVYLHKQSNTGSSSKRLTSPVPSRLPRRSPMSSLHLLRHRSSSFTPTSPPSPSWSPHAAFTAATERVRAGTLSPEDAHHLFDQLLQQSTPVPEQALNGFLAALTRARAPDTEVCRDGPSLALTLFNRVWREEAGRRVALPTVRTYNILMNCCCRVRRPDLGLAYFGRLLRTSLKTNEVVANTVLMCLCCAKRTDEAVNVLLHRMSVLGCVPDEFSYNIVLKSLCKEGRSQQALNLLHVMAKGDGCSPDVVAYNTVIYGFFKEGEVGKACNLFHEMMRQGVVPDVVTYSSIIDALCKAGAMDKAELFLRQMVDNSVQPDTVTYTSMIHGYSTLGRWKEATKMLREMTSRGLIPNIVTWNSFMASLCKHGKSKEAAEIFFSMAARGHKPDIVSYTTLLHGYANEGSFADMMKLFNSMVGNGIVANCQVFNILIDAYAQRGMMDEAMLIFTEMPGQGVNPNVVTYSIVIAALCRMGRLADAMNKFSEMIGTGVQPNIVVYHSLVQGLCTHGDLVKAKVLISEMMNKGIARPNIAFFSSIMGSLCNEGRIMNAHDIFDLVTDIGVKPDVITFNMLMVGYCLVGEMEKAFKVLDAMVSVGIEPDVVTYSSLISGYCKTGRLDDGVTLFREMLHKRIKPDTVSYNTILDGLFNAGRTAAARKMFHEMIESGVMVSISTYNIILGGLCRNNCMDEAIVLFRKLRAVNVKFNITTLNTIINALYNVQRREEAHDLFAALPASRLVPNASTYRVMIDNLLKEGAVEEADSMFSSMEKSGCAPSSHFLNYIIRMLLEKGEIVKAGKYMSKVDGKIILLEASTTSLLMSLFSRGGKYQEHILLLPAKYHFFSGVNHS

SEQ ID NO: 4 - protein, 816 aa, Triticum aestivum
MSSLHLLRHRSSSFTPTSPPSPSWSPHAAFTAATERVRAGTLSPEDAHHLFDQLLQQSTPVPEQALNGFLAALTRARAPDTDVCRDGPSLALTLFNRVWREEAGRRVALPTVRTYNILMNCCCRVRRPDLGLAYFGRLLRTSLKTNEVVANTVLMCLCCAKRTDEAVNVLLHRMSVLGCVPDEFSYNIVLKSLCKEGRSQQALNLLHVMAKGDGCSPDVVAYNTVIYGFFKEGEVGKACNLFHEMMRQGVVPDVVTYSSIIDALCKAGAMDKAELFLRQMVDNSVQPDTVTYTSMIHGYSTLGRWKEATKMLREMTSRGLIPNIVTWNSFMASLCKHGKSKEAAEIFFSMAARGHKPDIVSYTTLLHGYANEGSFADMMKLFNSMVGNGIVANCQVFNILIDAYAQRGMMDEAMLIFTEMPGQGVNPNVVTYSIVIASLCRMGRLADAMNKFSEMIGTGVQPNIVVYHSLVQGLCTHGDLVKAKVLISEMMNKGITRPNIAFFSSIMGSLCNEGRIMNAHDIFDLVTDIGVKPDVITFNMLMVGYCLVGEMEKAFKVLDAMVSVGIEPDVVTYSSLISGYCKTGRLDDGVTLFREMLHKRIKPDTVSYNTILDGLFNAGRTAAAKKMFHEMIESGVMVSISTYNIILGGLCRNNCMDEAIVLFRKLRAVNVKFNITTLNTIINALYNVQRREEAHDLFAALPASRLVPNASTYRVMIDNLLKEGAVEEADSMFSSMEKSGCAPSSHFLNYIIRMLLEKGEIVKAGKYMSKVDGKIILLEASTTSLLMSLFSRGGKYQEHILLLPAKYHFFSGVNHS

SEQ ID NO: 5 - protein, 968 aa, Triticum aestivum
MAAAPRGLQLCRSRGQEYVVSVTERLLREITSGHAVLFSATERLLREVRVGMRSCFCNRAFIAGCNEWACGAWTLHRTAISSCIQRSSRRRSKHRPGDLLQVTRTTILGRRREYVFVIKKKRVVYLHKQSNTGSSSKRLTSPVPSRLPRRSPMSSLHLLRHRSSSFTPTSPPSPSWSPHAAFTAATERVRAGTLSPEDAHHLFDQLLQQSTPVPEQALNGFLAALTRARAPDTEVCRDGPSLALTLFNRVWREEAGRRVALPTVRTYNILMNCCCRVRRPDLGLAYFGRLLRTSLKTNEVVANTVLMCLCCAKRTDEAVNVLLHRMSVLGCVPDEFSYNIVLKSLCKEGRSQQALNLLHVMAKGDGCSPDVVAYNTVIYGFFKEGEVGKACNLFHEMMRQGVVPDVVTYSSIIDALCKAGAMDKAELFLRQMVDNSVQPDTVTYTSMIHGYSTLGRWKEATKMLREMTSRGLIPNIVTWNSFMASLCKHGKSKEAAEIFFSMAARGHKPDIVSYTTLLHGYANEGSFADMMKLFNSMVGNGIVANCQVFNILIDAYAQRGMMDEAMLIFTEMPGQGVNPNVVTYSIVIAALCRMGRLADAMNKFSEMIGTGVQPNIVVYHSLVQGLCTHGDLVKAKVLISEMMNKGIARPNIAFFSSIMGSLCNEGRIMNAHDIFDLVTDIGVKPDVITFNMLMVGYCLVGEMEKAFKVLDAMVSVGIEPDVVTYSSLISGYCKTGRLDDGVTLFREMLHKRIKPDTVSYNTILDGLFNAGRTAAARKMFHEMIESGVMVSISTYNIILGGLCRNNCMDEAIVLFRKLRAVNVKFNITTLNTIINALYNVQRREEAHDLFAALPASRLVPNASTYRVMIDNLLKEGAVEEADSMFSSMEKSGCAPSSHFLNYIIRMLLEKGEIVKAGKYMSKVDGKIILLEASTTSLLMSLFSRGGKYQEHILLLPAKYHFFSGVNHS

SEQ ID NO: 6 - protein, 917 aa, Triticum aestivum
MRSCFCNRAFIAGCNEWACGAWTLHRTAISSGIQRSSRRRYKHQPGDLLQVTRTTILGRRREYVFVIKKKRVVYLHKQSNTGSSSKRLTSPVPSRLPRRSPMSSLHLLRHRSSSFTPTSPPSPSWSPHAAFTAATERVRAGTLSPEDAHHLFDQLLQQSTPVPEQALNGFLAALTRARAPDTDVCRDGPSLALTLFNRVWREEAGRRVALPTVRTYNILMNCCCRVRRPDLGLAYFGRLLRTSLKTNEVVANTVLMCLCCAKRTDEAVNVLLHRMSVLGCVPDEFSYNIVLKSLCKEGRSQQALNLLHVMAKGDGCSPDVVAYNTVIYGFFKEGEVGKACNLFHEMMRQGVVPDVVTYSSIIDALCKAGAMDKAELFLRQMVDNSVQPDTVTYTSMIHGYSTLGRWKEATKMLREMTSRGLIPNIVTWNSFMASLCKHGKSKEAAEIFFSMAARGHKPDIVSYTTLLHGYANEGSFADMMKLFNSMVGNGIVANCQVFNILIDAYAQRGMMDEAMLIFTEMPGQGVNPNVVTYSIVIASLCRMGRLADAMNKFSEMIGTGVQPNIVVYHSLVQGLCTHGDLVKAKVLISEMMNKGITRPNIAFFSSIMGSLCNEGRIMNAHDIFDLVTDIGVKPDVITFNMLMVGYCLVGEMEKAFKVLDAMVSVGIEPDVVTYSSLISGYCKTGRLDDGVTLFREMLHKRIKPDTVSYNTILDGLFNAGRTAAAKKMFHEMIESGVMVSISTYNIILGGLCRNNCMDEAIVLFRKLRAVNVKFNITTLNTIINALYNVQRREEAHDLFAALPASRLVPNASTYRVMIDNLLKEGAVEEADSMFSSMEKSGCAPSSHFLNYIIRMLLEKGEIVKAGKYMSKVDGKIILLEASTTSLLMSLFSRGGKYQEHILLLPAKYHFFSGVNHS

SEQ ID NO: 7 - protein, 917 aa, Triticum aestivum; identical to SEQ ID NO: 6

SEQ ID NO: 8 - protein, 917 aa, Triticum aestivum; identical to SEQ ID NO: 3

SEQ ID NO: 9 - protein, 504 aa, Triticum aestivum
MLRKMTTRGLIPDIVTCSSLMTSLCKHGRSKEALDIFCSMTAKGLKPNIIAYSILLHGYATEGCFVDMINLFNSMEDNGIAANCYVFNILIDAYAKHGMMDEAMLIFTEMREKGVSPDVVTYSTVITAFCRLRRLADAMDKFNEMTDMGVQPDTTVYHSLIQGFCMHGDLVKAKGLVSEMTNKGIPRPDIVFFSSIINTLCKEGRVMDAQDIFEMVISIDGRPDVITFSSLIDGYGLVGQMGKALGVLDAMVSAGIEPDVVTYSSLLDGYCRNGRINDALILFREMPHKRIKPNTVTYGIILDGLFRAGRTVDARKMFHEMIERGITVSISIYNIILGGLCRNNCADEAIALFQKLGAMNVKFNIITLNTMINAMFKVRRREEANDLFAAISAGGLVPNASTYGIMIKNILKEGSVEEVDSMFSSMEKSGIIPNSCLINIIIRMLLEKGEIAKARNYLSKVDGKVISLEASTTSLLLSLFSRKGKYRESIELLPANYQFFDGFG

SEQ ID NO: 10 - protein, 697 aa, Triticum aestivum
MGCFCGARRPDLGLALFGHFLRTGLKTNKIVATTFLKCLCCAKRTDEAVNVLLHRMPELGCVPDAFSYSIVLKSLCENSMSQRALDLLQMVAKGGDACSVNVVAYNTVIHGFFKEGETGKACNLFHEMIHQGVVPDVVTFNSIIHALCKARAMDKAEIVLRQMVDNGAQPNEVTYNCMIHGYSKSGQLREGTKMLRKMTTRGLIPDIVTCSSLMTSLCKHGRSKEALDIFCSMTAKGLKPNIIAYSILLHGYATEGCFVDMINLFNSMEDNGIAANCYVFNILIDAYAKHGMMGEAMLIFTEMREKGVSPDVVTYSTVIAAFCRLRRLADAMDKFNEMTDMGVQPDTTVYHSLIQGFCMHGDLVKAKGLVSEMTNKGIPRPDIAFFSSIINTLCKEGRVMDAQDIFEMVISIDGRPDVITFSSLIDGYGLVGQMGKALGVLDAMVSAGIEPDVVTYSSLLDGYCRNGRINDALILFREMPRKRIKPNTVTYGIILDGLFRAGRTVDARKMFHEMIERGITVSISICNIILGGLCRNNCADEAIALFQKLGAMNVKFNIITLNAMINAMFKVRRREEANDLFAAISASGLVPNASTYGIMIKNILKEGSVEEVDSMFSSMEKSGIIPNSCLINIIIRMLLEKGEIAKAGNYLSKVDGKVISLEASTTSLLLSLFSRKGKYRESIELLPANYQFFDGFG

SEQ ID NO: 11 - protein, 697 aa, Triticum aestivum; identical to SEQ ID NO: 10

SEQ ID NO: 12 - protein, 504 aa, Triticum aestivum; identical to SEQ ID NO: 9

SEQ ID NO: 13 - protein, 697 aa, Triticum aestivum; identical to SEQ ID NO: 10

SEQ ID NO: 14 - protein, 697 aa, Triticum aestivum; identical to SEQ ID NO: 10

SEQ ID NO: 15 - protein, 813 aa, Triticum aestivum
MSGVCLRRRLSSTSTSNTPPSPSWSPQAAFAAATERARAGTLSPQDAHHLFDELFRQATPVPERSLEGFLAALGRAASSEACRDGPSLALTLFNRLCREEAGRRVAPPTIYTYGILMNCCCRVRRPDLGLAFFGRLLRTGLKTNEVVASTLLKCLCCAKRADEAVNVLLHRMSVLGCVPNSFSYNIVLKSLCDDSRSQRALGLLQMMAKGGVCSPNVLSYNTVIHGFFKEGEIDKACNLFHEMTKQGFVPNVVTYNSVINALCKARAMDNAESFLRQMVDNGVPPDKVTYTSIIHGYSTLGRWKEATKMFREMTSRGLIPDIVTRNSFMDSLCKHGRSKEAAEIFFSMAARGHKPDIVSYTILLHGYGNEGSFSDMMSLFNSMEGGGIVADCQVFNILIDAYAKRGMIDEAMLIFTEMLGQGVNPSVVTYSTLIAALCRTGRLADAMDKFSQMVGTGVQPDTVVYHSLIQGFCTHGDLVKAKELISEMMNKGIICPNIAFFNSIVDSLCKEGRVMDAHHIFDLVKDIGEKPDAIMFNTLIDGYCLVGEMGKAFMVLDVMTSAGIEPDAITYSTLVSGYCKSGRIDDGLILFREEMLHKKVKPTIVTYNIILEGLFRAGRTVAAKKMLHEIIGSGTPVSMHTYDIFLRGLCRNNCADEAIVLFQKSRAMNVKFNITTLNTMINAFYKGDRREEANDLFAALPASGLVPNASTYGVMIQNLLKEGAVEEADNMFSSMEKSGCAPSSRLVNDVIRTLLEKGEIVKAGKYMSKVYGKSLSLDASTSSLLLSLFSGNGKYREQIQLLPAKYQFFGGIS

SEQ ID NO: 16 - protein, 813 aa, Triticum aestivum; identical to SEQ ID NO: 15

SEQ ID NO: 17 - protein, 813 aa, Triticum aestivum; identical to SEQ ID NO: 15

SEQ ID NO: 18 - protein, 813 aa, Triticum aestivum; identical to SEQ ID NO: 15

SEQ ID NO: 19 - protein, 813 aa, Triticum aestivum; identical to SEQ ID NO: 15

SEQ ID NO: 20 - protein, 813 aa, Triticum aestivum; identical to SEQ ID NO: 15

SEQ ID NO: 21 - protein, 608 aa, Triticum aestivum
MMAKGGVCSPNVLSYNTVIHGFFKEGEIGKACNLFHEMAKQGFVPNVVTYNSVINALCKARAMDNAESFLRQMVDNGVPPDKVTYTSIIHGYSTLGRWKEATKMFRETTSRGHIPDIVTRNSFMDSLCKHGRSKEAAEIFFSMAARGHKPDIVSCTILLHGYGNEGSFSDMMSLFNSMEGGGIVADCQVFNILIAAYAKRGMIDEAMLIFTEMLGQGVNPSVVTYSTLIAALCRTGRLADAMDKFSQMVDTGVQPDTVVYHSLIQGFCTHGDLVKAKELISEMMNKGMICPNIAFFNSIVDSLCKEGRVMDAHHIFDLVKDIGEKPDVIMFNTLIDGYCLVGEMGKAFMVLDVMTSAGIEPDAITYSTLVSGYCKSGRIDDGLILFREEMLHKKVKPTIVTYNIILEGLFRAGRTVAAKKMLHEIIGSGTPVSMHTYDIFLRGLCRNNCANEAIVLFQKSRAMNVKFNITTLNTMINAFYKGDRREEANDLFAALPASGLVPNASTYGVMIQILLKEGAVEEADNMFSSMEKSGCAPSSRLVNDVIRTLLEKGEIVKAGKYMSKVDGKSISLDASTSSLLLSLFSGNGKYREQIQLLPAKYQFFGGIS

SEQ ID NO: 22 - protein, 880 aa, Triticum aestivum
MLRRIRISTPVIGGKKAPVRTPDADAPRHPHPPPSPPLPLLHLAGVRSPPPSPPLVRLHQYRTTSTPMSRIHLHLHQHRRLFSSTSPPSRSWSPHEAFAAATERVRAGNFSWEDAHNLFDELLRQATPVPGRSLNGFLAALARAPASEACRDGPALALALFNHVCRDESGARVAPPTIFTYGILMNCCCRAHRPDLGLAFFGRLLRTGLKADLIVANTLLKCLCRAKRTDEAVNVLLHRMSELGCVPDAFSYSIVLKSLCDNGMSQQALNLLHMMAKVGGGCSPDVVAYSTVIHGFFKEGETGKACNLFHEMMQQGVEPNVWTYSSIIDALCKARAMDKAELVLQQMVNKGVQPDNVTYNCMIHGYSTSGRWKEAVKLFREMKSRGLIPDNFTCNSLMTYLCKHGRSKEGAEFFDAMTAKGHRDVISYYILLHGYANEGCFADMIDLFNSMERNGIAANCRVFNILINGHAKRGMTDEAMLIFTEMWEKGVSPNVVTYSTVIAALSRMGRLTDSMEKFNQMIAMGIQPNTAVYHSLIQGCFMHGGLVKAKELMFEMMNKGIPRPNIVFFSSVINSLCKEGRVMDAHAVFDLAIGIGERPNVITFNSLIDGYCLVGKMDKAFKILHVMESVGVESDVVTYSALLDGYFKNRRIDDALTLFREMPRKRIKPNTVTYGIMLGGLFHAGRTVAAMKMFHEMIESGATVRISTYNIILGGLCQTNCVDEAIALFQKLRAMNVKFNIEIFNTMIDAMYKVQRKEEAKELFAAISGNGLVPNEYTYAVMIRNLLKGGAVEDADNMFSSMDNSGIVPSSRLINDIIRMLLEKGEIAKAGNYLSKVDGKSISLEASTTSLMLSLFSRKGKHLEDIKLLPAKYQFFDGFG

SEQ ID NO: 23 - protein, 880 aa, Triticum aestivum
MLRRIRISTPVIGGKKAPVRTPDADAPRHPHPPPSPPLPLLHLAGVRSPPPSPPLVRLHQYRTTSTPMSRIHLHLHQHRRLFSSTSPPSRSWSPHEAFAAATERVRAGNFSWEDAHNLFDELLRQATPVPGRSLNGFLAALARAPASEACRDGPALALALFNHVCRDESGARVAPPTIFTYGILMNCCCRAHRPDLGLAFFGRLLRTGLKADLIVANTLLKCLCRAKRTDEAVNVLLHRMSELGCVPDAFSYSIVLKSLCDNGMSQQALNLLHMMAKVGGGCSPDVVAYSTVIHGFFKEGETGKACNLFHEMMQQGVEPNVWTYSSIIDALCKARAMDKAELVLQQMVNKGVQPDNVTYNCMIHGYSTSGRWKEAVKLFREMKSRGLIPDNFTCNSLMTYLCKHGRSKEGAEFFDAMTAKGHRDVISYYILLHGYANEECFADMIDLFNSMERNGIAANCRVFNILINGYAKRGMTDEAMLIFTEMWEKGVSPNVVTYSTVIAALSRMGRLTDSMEKFNQMIAMGIQPNTAVYHSLIQGCFMHGGLVKAKELMFEMMNKGIPRPNIVFFSSVINSLCKEGRVMDAHAVFDLAIGIGERPNVITFNSLIDGYCLVGKMDKAFKILHVMESVGVESDVVTYSALLDGYFKNRRIDDALTLFREMPRKRIKPNTVTYGIMLGGLFHAGRTVAAMKMFHEMIESGATVRISTYNIILGGLCQTNCVDEAIALFQKLRAMNVKFNIEIFNTMIDAMYKVQRKEEAKELFAAISGNGLVPNEYTYAVMIRNLLKGGAVEDADNMFSSMDNSGIVPSSRLINDIIRMLLEKGEIAKAGNYLSKVDGKSISLEASTTSLMLSLFSRKGKHLEDIKLLPAKYQFFDGFG

SEQ ID NO: 24 - protein, 880 aa, Triticum aestivum; identical to SEQ ID NO: 23

SEQ ID NO: 25 - protein, 880 aa, Triticum aestivum; identical to SEQ ID NO: 23

SEQ ID NO: 26 - protein, 880 aa, Triticum aestivum; identical to SEQ ID NO: 23

SEQ ID NO: 27 - protein, 880 aa, Triticum aestivum; identical to SEQ ID NO: 22

SEQ ID NO: 28 - protein, 877 aa, Triticum aestivum
MLRRIRISTPVAPVRTPDADAPRHPHPPPLPPLPLLHLAGVRSPPPSPPLVRLHQYRTTSTPMSRIHLHLHLHQHRRLFSSTSPPSRSWSPHEAFAAATERVRAGNFSWEDAHNLFDELLRQATPVPGRSLNGFLAALARAPASEACRDGPALALALFNHVCRDESGARVAPPTIFTYGILMNCCCRAHRPDLGLAFFGRLLRTGLKADLIVANTLLKCLCRAKRTDEAVNVLLHRMSELGCVPNAFSYSIVLKSLCDNGMSQQALDLLHMMAKEGGDCSPDVVAYSTVIHGFFKEGETGKACNLFHEMMQQGVEPNVWTYSSIIDALCKARAMDKAELVLQQMVNKGVQPDNVTYNCMIHGYSTSGRWKEAVKLFREMKSRGLIPDNFTCNSLMTYLCKHGRSKEGAEFFDAMTAKGHRDVISYCILLHGYANEGCFADMIDLFNSMERNGIAANCRVFNILINGYAKRGMTEEAMLIFTEMWEKGVSPNVVTYSTVIAALSRMGRLTDSMDKFNQMIAMGIQPNTAVYHSLIQGCFMHGGLVKAKELMFEMMNKGIPRPNIVFFSSVINSLCKEGRVMDAHAVFDLAIGIGERPNVITFNSLIDGYCLVGKMDKAFKILLVMESVGVEPDVVTYSALLDGYFKNRSIDDALTFFREMPRKRIKPNTVTYGIMLGGLFRAGRTVAAMKMFHEMIESGATVRISTYNIILGGLCQTNCVDEAIALFQKLRAMNVKFNIEIFNTMIDAMYKVQRKEEAKELFAAISGNGLVPNEYTYAVMIRNLLKGGAVEDADNMFSSMDNSGIVPSSRLINDIIRMLLEKGEIAKAGNYLSKVDGKSISLEASTTSLMLSLFSRKGKHLEDIKLLPAKYQFFDGFG

SEQ ID NO: 29 - protein, 367 aa, Triticum aestivum
MAAKGLKPNIVSYSTMLNGYVKEGSFEDMTDLFNSMVRNGIVPNHHIFNIQINAYAKRGLMDEAMHMFEVMRQQGVNPNVVDYLVVMNSLCKMGRMDAALDKFNQMVNQGVSPNKAVYQCLVLGSCSHGHFVKAKELISEAVNRGLCSNSVFFYPVINDLCKEGKVEGKVKEAQDMFDFIVGIGHRPDVIMYTSLMDGYCLVGKVEEALRVLDAMKSAGLQPDAFTYGILINGYCKIGRIDEGLSLVREISLSGVKPTTIMYNIILDGLFCSGRTVPAKEKFHKMNESAIPVGVGTYNIVLSGLCKNNCTDEAIELFKKLRAVNVKINVITLTTMISAMFSQKNGSTLALHLLSSFCHLILFAQLNI

SEQ ID NO: 30 - protein, 367 aa, Triticum aestivum; identical to SEQ ID NO: 29

SEQ ID NO: 31 - protein, 367 aa, Triticum aestivum
MAAKGLKPNIVSYSTMLNGYVKEGSFEDMTDLFNSMVRNGIVPNHHIFNIQINAYAERGLMDEAMHMFEVMRQQGVNPNVVDYLVVMNSLCKMGRMDAALDKFNQMVNQGVSPNKAVYQCLVLGSCSHGHFVKAKELISEAVNRGLCSNSVFFYPVINDLCKEGKVEGKVKEAQDMFDFIVGIGHRPDVIMYTSLMDGYCLVGKVEEALRVLDAMKSAGLQPDAFTYGILINGYCKIGRIDEGLSLVREISLSGVKPTTIMYNIILDGLFCSGRTVPAKEKFHKMNESAIPVGVGTYNIVLSGLCKNNCTDEAIELFKKLRAVNVKINVITLTTMISAMFSQKNGSTLALHLLSSFCHLILFAQLNI

SEQ ID NO: 32 - protein, 217 aa, Triticum aestivum
MRWSPTLCTYSILMYCCCRAGRPDLVVAFFGRILRLGLRLDVISLNNLLKGLCQAKRSNEALDLLLHRMPELHCAPDVFSYNIVINGCLKEGEVDKACNLFHEMPQLGVQPDVVTYTSIMDALSKSGAMDKAEVLLRQMVDQGIEPNIRTYSCLIHGYSTFGQWKEALRVFKEMATLGVVPDVVTLSSLIDSLCKHRRTKEAREIFDSIYGCKGPET

SEQ ID NO: 33 - protein, 773 aa, Triticum aestivum
MSTARLSSTFTSSFKAPSRKPRAPRLAALAAATERVRAGTLSRQDAHHLFDELLSQAATVPVRTLNNFLAALARAPPSAACGDGPALAVTLFNRMSRGAGARVVSPTLCTYSILMDCCCRAGRPDLVVAFFGRLLRLGLRLEVISFSNLLKGLCQAKRTNEAVDLLLHRTPELDCVPNVFSYSIVINGCFKEGEVDKACNLFHGMIQLGVQPNVVIYTSIIDALSKCGAMDKAEVVFRQMVDKGIGPDVMTCTSLIHGYSISGRWKAAVRVFKEMISLGVVPDTVMWNSFVDSLCKHRRTKEARVIFDSMAAKGQKPDTVSYSIMLNGYVKEGCFDDMTGLFNSMLQNGVVPNHHIFNILINAYAKRGLMDEAMHMFEVMRQQGVNPDVVDYLVVMDSLCKMGRMDAALDKFNQMVNQGVSPNKAVYQCLVLGFCSHGDFVKAKELISETINRGLCSNNVFFYPVINDLCKEGKVKEAQDMFDFIVGIGQRPDVIMYNSLMDGYCLVGKVEEALRVLDAMKSAGLQPDAITYAILLNGYCKIGRIADGLSLFREMSLSGVKPTTIMYSIILDGLFRSGRTVSAKEKFNTMVESGLPVDVRTYNIVLHGLCRNNCTGEAIELFKKLCATNLKINVITFNTMISAMFKTRRIGEAKDLFATISAIGLVPSVVTYSVMTTNFIKEGLLAEADDMFLAMEKAGCAPDSRLLNHVVSVLLENGAVVKAATYLAKLDAKQLSLEASTVSLIVSLFSRKGKLREHVKLLPVKYQPPEMLG

SEQ ID NO: 34 - protein, 773 aa, Triticum aestivum
MSTARLSSTFTSSFKAPSRKPRAPRLAALAAATERVRAGTLSRQDAHHLFDELLSQAATVPVRTLNNFLAALARAPPSAACGDGPALAVTLFNRMSRGAGARVVSPTLCTYSILMDCCCRAGRPDLVVAFFGRLLRLGLRLEVISFSNLLKGLCQAKRTNEAVDLLLHRTPELDCVPNVFSYSIVINGCFKEGEVDKACNLFHGMIQLGVQPNVVIYTSIIDALSKCGAMDKAEVVFRQMVDKGIGPDVMTCTSLIHGYSISGRWKAAVRVFKEMISLGVVPDTVMWNSFVDSLCKHRRTKEARVIFDSMAAKGQKPDTVSYSIMLNGYVKEGCFDDMTGLFNSMLQNGVVPNHHIFNILINAYAKRGLMDEAMHMFEVMRQQGVNPDVVDYLVVMDSLCKMGRMDAALDKFNQMVNQGVSPNKAVYQCLVLGFCSHGDFVKAKELISETINRGLCSNNVFFYPVINDLCKEGKVKEAQDMFDFIVGIGQRPDVIMYNSLMDGYCLVGKVEEALRVLDAMKSAGLQPDAITYAILLNGYCKIGRIADGLSLFREMSLSGVKPTTIMYSIILDGLFRSGRTVSAKEKFNTMVESGLPVDVRTYNIVLHGLCRNNCTGEAIELFKKLCATNVKINVITFNTMISAMFKTRRIGEAKDLFATISAIGLVPSVVTYSVMTTNFIKEGLLAEADDMFLAMEKAGCAPNSRLLNHVVRVLLENGAVVKAATYLAKLDAKQLSLEASTVSLIVSLFSRKGKLREHVKLLPVKYQPPEMLD

SEQ ID NO: 35 - protein, 539 aa, Triticum aestivum
MSTARLSSTFTSSFKAPSRKPRAPRLAALAAATERVRAGTLSRQDAHHLFDELLSQAATVPVRTLNNFLAALARAPPSAACGDGPALAVTLFNRMSRGAGARVVSPTLCTYSILMDCCCRAGRPDLVVAFFGRLLRLGLRLEVISFSNLLKGLCQAKRTNEAVDLLLHRTPELDCVPNVFSYSIVINGCFKEGEVDKACNLFHGMIQLGVQPNVVIYTSIIDALSKCGAMDKAEVVFRQMVDKGIGPDVMTCTSLIHGYSISGRWKAAVRVFKEMISLGVVPDTVMWNSFVDSLCKHRRTKEARVIFDSMAAKGQKPDTVSYSIMLNGYVKEGCFDDMTGLFNSMLQNGVVPNHHIFNILINAYAKRGLMDEAMHMFEVMRQQGVNPDVVDYLVVMDSLCKMGRMDAALDKFNQMVNQGVSPNKAVYQCLVLGSCSHGDFVKAKELISEALNRGLCSNSVFFYPVINDLCKEGKVKEAQDMFDFIVGIGQRPDVIMYNSLMDGYCLVGKVEEALRVLDAMKSAGLQPDAIMYGILLNDH

SEQ ID NO: 36 - protein, 773 aa, Triticum aestivum; identical to SEQ ID NO: 33

SEQ ID NO: 37 - protein, 773 aa, Triticum aestivum; identical to SEQ ID NO: 34

SEQ ID NO: 38 - protein, 773 aa, Triticum aestivum; identical to SEQ ID NO: 34

SEQ ID NO: 39 - protein, 787 aa, Triticum aestivum
MPRFSSTTPMAPPRLLLRLGARHSSSTSHPSRIWDPHAAFAAAADRARSGNLTPEDAHHLFDELLRQGNPVQERPLNNFLAALARAPASASCSDCPALAVALFGRLSRGAGRRVVQPNVFTYGVLMDCCCRACRTDLALAFFGRLLKTGLEADQVVFSTLLKGLCHAKRADEALDVLLDRMPELGCTPDVVAYTTVIHGFFREGQVGKACDLFHEMAQQGVTPDVVTYSSVIDALCKAKAMDKAEYFLGQMVDSGVVPNNVTYNSLIHGYSSSGHSKEAVRVLKKMTSQGIIPDVFTCNSLMASLCNNRKSKEAAEIFHSMAMKGLKPDIVSYSTLLHGYATEGCLVDMTNLFNSMTRDGILPNCHALNILINAYAKSGMMDEAMLIFKGMRKQGVSPDAVTYATVIHAFCRNGRLDDAVIKFNQMIDTGVRPDTAVYGSLIQGFCTHGDLVKSKELVTEMMNKGIPRPDIKFFHSIMQNLCTEGRVIEARDILGLIAHIGMRPNVVTFSVLIGGYCLVRKMADASKVFDDMVSYGLEPSNITYGILINGYCKNKRIDDGLILFKTMLHKGLKPTTFNYNVILDGLFLAGRTVAAKEKFNEMVESGVSVCIGTCSIVLGGLCRNGCSSEAITLFRKLSAMNVKFDITIVNTIIGAFYRVERNQEAKDLFAAIPANGLVPNSITYTIMMTNLIKEGSVEEADNLFLSMENSGCSANSYLLNHVIRRLLQKGEIVKAGNYMSKVDAKSFSLEAKTVSLLISLFSRKGKYREHIKLLPTKYQFLEEATVE

SEQ ID NO: 40 - protein, 787 aa, Triticum aestivum
MPRFSSTTPMAPPRLLLRLGARHSSSTSHPSRIWDPHAAFAAAADRARSGNLTPEDAHHLFDELLRQGNPVQERPLNNFLAALARAPASASCSDCPALAVALFGRLSRGAGRRVVQPNVFTYGVLMDCCCRACRTDLALAFFGRLLKTGLEADQVVFSTLLKGLCHAKRADEALDVLLDRMPELGCTPDVVAYTTVIHGFFREGQVGKACDLFHEMAQQGVTPDVVTYSSVIDALCKAKAMDKAEYFLGQMVDSGVVPNNVTYNSLIHGYSSSGHSKEAVRVLKKMTSQGIIPDVFTCNSLMASLCNNRKSKEAAEIFHSMAMKGLKPDIVSYSTLLHGYATEGCLVDMTNLFNSMTRDGILPNCHALNILINAYAKSGMMDEAMLIFKGMRKQGVSPDAVTYATVIHAFCRNGRLDDAVIKFNQMIDTGVRPDTAVYGSLIQGFCTHGDLVKSKELVTEMMNKGIPRPDIKFFHSIMQNLCTEGRVIEARDILGLIAHIGMRPNVVTFSVLIGGYCLVRKMADASKVFDDMVSYGLEPSNITYGILINGYCKNKRIDDGLILFKTMLHKGLKPTTFNYNVILDGLFLAGRTVAAKEKFNEMVESGVSVCIGTCSIVLGGLCRNGCSSEAITLFRKLSAMNVKFDITIVNTIIGAFYRVERNQEAKDLFAAIPANGLVPNSVTYTIMMTNLIKEGSVEEADNLFLSMENSGCSANSYLLNHVIRRLLQKGEIVKAGNYMSKVDAKSFSLEAKTVSLLISLFSRKGKYREHIKLLPTKYQFLEEATVE

SEQ ID NO: 41 - protein, 787 aa, Triticum aestivum; identical to SEQ ID NO: 40

SEQ ID NO: 42 - protein, 787 aa, Triticum aestivum; identical to SEQ ID NO: 40

SEQ ID NO: 43 - protein, 787 aa, Triticum aestivum; identical to SEQ ID NO: 40

SEQ ID NO: 44 - protein, 787 aa, Triticum aestivum; identical to SEQ ID NO: 40

SEQ ID NO: 45 - protein, 680 aa, Triticum aestivum
MARALPSPSSTACPEALVHGWCRCRAGRPDLVVAFFGRLLRLGLCLNVISLSNLLKGLCQVKRTNEAVDLLLHRTPELDCVPNVFSYSIVINGCFKQGEVDKACNLFHGMIQLGVQPNVVIYTSIIDALSKCGVMDKAEVVFRQMVDKGIGPDVMTCTSLIHGYSISGRWKAAVRVFKEMISLGVVPDTVMWNSFVDSLCKHRRTKEARVIFDSMAAKGQKPDTVSYSIMLNGYVKEGCFDDMTGLFNSMLQNGVVPNHHIFNILINAYAKRGLMDEAMHMFEVMRQQGVNPDVVDYQIVMDSLCKMGRMDAALDKFNQMVNQGVSPDKAVYRCLVLGSCSHGDFVKAKELISEAVNRGLCSNSVFFYPVINDLCKEGKVKEAQDMFDFIVGIGQRPDVIMYNSLMDGYCLVGKVEEALRVLDAMKSAGLQPDAITYAILLNGYCKIGRIADGLSLFREMSLLGVKPTTIMYNIILDGLFRSGRTVSAKEKFRTMSESGIPVGVDTYNIVLHGLCRNNCTDEAIELFNKLRAMKLKINVITLNTMISAMFKTRRIEEAKDLFATISAIGLVPSVVTYSVMMTNFIKEGLLAEADDMFLAMEKASCAPDSILLNQVVRALLEKGAVVKAATYLAKLDAKQLSVEASTISLIVSLFSGEGKLREHVQLLPVKYQPPESSADN

SEQ ID NO: 46 - protein, 778 aa, Triticum aestivum
MPTGRLSSIFTSNATSSFRAPSPQPRAPLAALAAATERVRAGTLSRQDAHHLFDELLSQAATVPVRTLNNFLAALARAPPSAACGDGPALAIALFNRMSQGAGARVVSPTLCTYSILMDCCCRAGRPDLVVAFFGRLIRLGLRLNVIPFNNLLKGLCKAKRSNEALDLLLHRMPELDCAPDVFSYSIVINGCFKEGEVDKACNLFHGMIQLGVQPNVVIYTSIIDALSKCGAMDKAEVVFRQMVDKGIGPDVMTCTSLIHGYSISGRWKAAVRVFKEMISLGVVPDTVMWNSFVDSLCKHRRTKEARVIFDSMAAKGQKPDTVSYSIMLNGYVKEGCFDDMTGLFNSMLQNGVVPNHHIFNILINAYAKRGLMDEAMHMFEVMRQQGVNPDVVDYQIVMDSLCKMGRMDAALDKFNQMVNQGVSPDKAVYRCLVLGSCSHGDFVKAKELISEAVNRGLCSNSVFFYPVINDLCKEGKVKEAQDMFDFIVGIGQRPDVIMYNSLMDGYCLVGKVEEALRVLDAMKSAGLQPDAITYAILLNGYCKIGRIADGLSLFREMSLLGVKPTTIMYNIILDGLFRSGRTVSAKEKFRTMSESGIPVGVDTYNIVLHGLCRNNCTDEAIELFNKLRAMKLKINVITLNTMISAMFKTRRIEEAKDLFATISAIGLVPSVVTYSVMMTNFIKEGLLAEADDMFLAMEKASCAPDSILLNQVVRALLEKGAVVKAATYLAKLDAKQLSVEASTISLIVSLFSGEGKLREHVQLLPVKYQPPESSADN

SEQ ID NO: 47 - protein, 680 aa, Triticum aestivum
MARALPSPSSTACPEALVHGWCRCRAGRPDLVVAFFGRLLRLGLCLNVISLSNLLKGLCQVKRTNEAVDLLLHRTPELDCVPNVFSYSIVINGCFKQGEVDKACNLFHGMIQLGVQPNVVIYTSIIDALSKCGAMDKAEVVFRQMVDKGIGPDVMTCTSLIHGYSISGRWKAAVRVFKEMISLGVVPDTVMWNSFVDSLCKHRRTKEARVIFDSMAAKGQKPDTVSYSIMLNGYVKEGCFDDMTGLFNSMLQNGVVPNHHIFNILINAYAKRGLMDEAMHMFEVMRQQGVNPDVVDYQIVMDSLCKMGRMDAALDKFNQMVNQGVSPDKAVYRCLVLGSCSHGDFVKAKELISEAVNRGLCSNSVFFYPVINDLCKEGKVKEAQDMFDFIVGIGQRPDVIMYNSLMDGYCLVGKVEEALRVLDAMKSAGLQPDAITYAILLNGYCKIGRIADGLSLFREMSLLGVKPTTIMYNIILDGLFRSGRTVSAKEKFRTMSESGIPVGVDTYNIVLHGLCRNNCTDEAIELFNKLRAMKLKINVITLNTMISAMFKTRRIEEAKDLFATISAIGLVPSVVTYSVMMTNFIKEGLLAEADDMFLAMEKASCAPDSILLNQVVRALLEKGAVVKAATYLAKLDAKQLSVEASTISLIVSLFSGEGKLREHVQLLPVKYQPPESSADN

SEQ ID NO: 48 - protein, 905 aa, Triticum aestivum
MHQGVGCTDPSGRGQNPRPSATSHPSLSVHSLDSSAASQAARRRPGPPEFLSLLSLRRRHASSSSPLLRASVATPRRRRAVPPSAWLVPSIAGDATRARCGGARTVSLPGGQDPRQLRAELRWRRPAMPTGRLSSIFTSNATSSFRAPSPQPRAPLAALAAATERVRAGTLSRQDAHHLFDELLSQAATVPVRTLNNFLAALARAPPSAACGDGPALAIALFNRMSQGAGARVVSPTLCTYSILMDCCCRAGRPDLVVAFFGRLIRLGLRLNVIPFNNLLKGLCKAKRSNEALDLLLHRMPELDCAPDVFSYSIVINGCFKEGEVDKACNLFHGMIQLGVQPNVVIYTSIIDALSKCGAMDKAEVVFRQMVDKGIGPDVMTCTSLIHGYSISGRWKAAVRVFKEMISLGVVPDTVMWNSFVDSLCKHRRTKEARVIFDSMAAKGQKPDTVSYSIMLNGYVKEGCFDDMTGLFNSMLQNGVVPNHHIFNILINAYAKRGLMDEAMHMFEVMRQQGVNPDVVDYQIVMDSLCKMGRMDAALDKFNQMVNQGVSPDKAVYRCLVLGSCSHGDFVKAKELISEAVNRGLCSNSVFFYPVINDLCKEGKVKEAQDMFDFIVGIGQRPDVIMYNSLMDGYCLVGKVEEALRVLDAMKSAGLQPDAITYAILLNGYCKIGRIADGLSLFREMSLLGVKPTTIMYNIILDGLFRSGRTVSAKEKFRTMSESGIPVGVDTYNIVLHGLCRNNCTDEAIELFNKLRAMKLKINVITLNTMISAMFKTRRIEEAKDLFATISAIGLVPSVVTYSVMMTNFIKEGLLAEADDMFLAMEKASCAPDSILLNQVVRALLEKGAVVKAATYLAKLDAKQLSVEASTISLIVSLFSGEGKLREHVQLLPVKYQPPESSADN

SEQ ID NO: 49 - protein, 680 aa, Triticum aestivum; identical to SEQ ID NO: 45

SEQ ID NO: 50 - protein, 778 aa, Triticum aestivum; identical to SEQ ID NO: 46

SEQ ID NO: 51 - protein, 399 aa, Triticum aestivum
MHKAELFLRQMVHNGVRPDEVTYTSMIHGYSTLGRLKEVRKIFREMTSRGLIPDIVTWNSFMDSLCKHGRTKEAAKVFFSMAAKGNKPNIVSYTILLHGYANEGSFADMMSLFNSMKGGGIVANCKVFNILIGAYAKRGLIDEAMLILTEMRGQGLSPDVVTYSTLISALWRMGKLTDAMDRFSQMVVGTGVQPDTVVYHSLVQFLCTHGDLVKAKELISEMMNKGIARPNTALFSSIMDSLRNEGRVIDAHHIFDLVIDIGEKPDSSMFSTLIDGYCLVGEMDKACGVLDAMVSAGIEPNVITYSTLVSRYCKRGRIANGLILFRQMLHKKVKPTTVTYETILNGLFRAGRTADAKKIFDEMIESGIMVSISTYNIILGGLCRNNCADEAIVLFQNVQ

SEQ ID NO: 52 - protein, 292 aa, Triticum aestivum
MSSIHLRHCSTMPMPRVCLRRRLSSSFSSSFSNCTSPPSPPWSPHAAFAAATERVRAGTLSPQDAHHLFDVLFQQATRVPERSLDGFLAALGGAASSEACRDGPALALALFNRIFREEAGMRVAPPTIFTYGILMNCCCRVRRPDLGLAFFGRILRAGLKTNQIAANTVIKCLCCAKHTDEAVNMLLHRMSDLGCVPDDFSYNTVLKSLCEDGRSLQALDLLLQMVSKEGGACSPDTVAYSTVIHGFLKEGKVDKACNLFNEMMRQGVVPDVVTYVFKAVRRGEALGGRLTA

SEQ ID NO: 53 - protein, 399 aa, Triticum aestivum; identical to SEQ ID NO: 51

SEQ ID NO: 54 - protein, 833 aa, Triticum aestivum
MSSIHLRHCSTMPMPRVCLRRRLSSSFSSSFSNCTSPPSPPWSPHAAFAAATERVRAGTLSPQDAHHLFDVLFQQATRVPERSLDGFLAALGGAASSEACRDGPALALALFNRIFREEAGMRVAPPTIFTYGILMNCCCRVRRPDLGLAFFGRILRAGLKTNQIAANTVIKCLCCAKHTDEAVNMLLHRMSDLGCVPDDFSYNTVLKSLCEDGRSLQALDLLLQMVSKEGGACSPDTVAYSTVIHGFLKEGKVDKACNLFNEMMRQGVVPDVVTYSSIIDALCKAGAMHKAELFLRQMVHNGVRPDEVTYTSMIHGYSTLGRLKEVRKIFREMTSRGLIPDIVTWNSLMDSLCKHGRTKEAAKVFFSMAAKGNKPNIVSYTILLHGYANEGSFADMMSLFNSMKGGGIVANCKVFNILIGAYAKRGLIDEAMLILTEMRGQGLSPDVVTYSTLISALWRMGKLTDAMDRFSQMVVGTGVQPDTVVYHSLVQFLCTHGDLVKAKELISEMMNKGIARPNTALFSSIMDSLRNEGRVIDAHHIFDLVIDIGEKPDSSMFSTLIDGYCLVGEMDKACGVLDAMVSAGIEPNVITYSTLVSRYCKRGRIANGLILFRQMLHKKVKPTTVTYETILNGLFRAGRTADAKKIFDEMIESGIMVSISTYNIILGGLCRNNCADEAIVLFQKLRAMNVKFNITTLNTIINALYKVERREEANDLFAALPASGLVPNASTYGVMVQNLLKEGAVEEADSMFSSMEKSGCAPSSRLINDVIRTLLEKGEIVKAGKYMSKVDGKSISLEASTSSLLLSLFSGNGKYRKQLQLLPAKYQFFKGIS

SEQ ID NO: 55 - protein, 292 aa, Triticum aestivum; identical to SEQ ID NO: 52

SEQ ID NO: 56 - protein, 292 aa, Triticum aestivum; identical to SEQ ID NO: 52

SEQ ID NO: 57 - protein, 836 aa, Triticum aestivum
MSSIHLRHCSTMPMSRVCLRRRLSSSSSSSSSSFSNCTSPPSPPWSPHAAFAAATERVRAGTLSPQDAHHLFDVLFQQATRVPERSLDGFLAALGGAASSEACRDGPALALALFNRIFREEAGMRVAPPTIFTYGILMNCCCRVRRPDLGLAFFGRILRAGLKTNQIAANTVIKCLCYAKHTDEAVNMLLHRMSDLGCVPDDFSYNTVLKSLCEDGRSLQALDLLLQMVSKEGGACSPDTVAYSTVIHGFLKEGKVDKACNLFNEMMRQGVVPDVVTYSSIIDALCKAGAMHMAELFLRQMVDNDVRPDEVTYTSMIHGYSTLGRLKEVRKMFREMTSRGLIPDIVTWNSFIDSLCKHGRTKEAAKVFFSMAAKGSKPNIVSYTILLHGYANEGSFADMMSLFNSMKGGGIVANCKVFNILIGAYAKRGLIDEAMLILTEMRGQGLSPDVFTYSTLISAHWRMGKLTDAMDKFSQMVVGTGVQPDAVVYHSLVQFLCTHGDLVKAKELLSEMMNKSIARPNTALFSSIMDSLCNEGRVIDAHHIFDLVIDIGEKPDISMFSMLIDGYCLVGEMDKACGVLDAMVSAGIEPNVITYSTLVSRYCKRGRIDDGLILFRQMLHKKVKPTTVTYETILNGLFRAGRTVDAKKIFDEMIESGIMVSISTYNIILGGLCRNNCADEAIVLFQKLRAMNVKFNITTLNTIINALYKVERREEANDLFAALPASGLVPNASTYGVMVQNLLKEGAVEEADSMFSSMEKTGCAPSSRLINDVIRTLLEKGEIVKAGKYMSKVDGKSISLEASTSSLLLSLFSGNGKYRKQLQLLPAKYQFFEGIS

SEQ ID NO: 58 - protein, 399 aa, Triticum aestivum; identical to SEQ ID NO: 51

SEQ ID NO: 59 - protein, 399 aa, Triticum aestivum; identical to SEQ ID NO: 51

SEQ ID NO: 60 - protein, 292 aa, Triticum aestivum; identical to SEQ ID NO: 52

SEQ ID NO: 61 - protein, 833 aa, Triticum aestivum; identical to SEQ ID NO: 54

SEQ ID NO: 62 - protein, 824 aa, Triticum aestivum
MPRLRLRRFSTAPMFHLLHRSSSSTSTSPPSRSWSPHAAFAAATERVRAGTLSPEDAHHLFDELLRQATPVTGRSLNGFLSALARAPASAACIRDGPALAVALFNRVCREEASQQVAPLTVHTYGILMGCFCGARRPDLGLALFGRFLRTGLKTNEIIATTFLKCLCSAKRTDEAVNLLLHRMPELGCVPNAISYSIVLKSLCENSMSQRALDLLQTVAEGGGACSLNVVAYSTVIHGFFKEGKTGKACNLFHEMIHQGVDPDVVTYNLIIDALCKARAMDKAELVLQQMVDKGVQPNTVTYNCMIHGYSTSGQLKEAAKMFRKMTSHGLVPNAVTCNLLMTSLCKHGRSKEAAEIFYSMTAKGHKLDAVSYRILLHGYATEGCFADMIDLFNSMESNGFVADCHVFTILIDAYAKRGMMDEAMLIFTEMREKGVSPNVVTYSTVIAAFCRLRRLANAMDKFNEMTDMGVQPDTTVYHSLIQGFCMHGDLVKVKEFVSEMMNKGIPRPDIAFFNSVINSLCKEGRVMNAQGIFDLVIGMGERPNVITFSSLIDGYGLVGQMGEALGVLDAMVSAGIEPNVVTYSSILDGYCRNGRINDALILFREMPRKRIKPNTVTYGIMLDGLFRAGRTVAAREMFHEMTERGIPVSISIYNIILGGLCRNNCADEAITLFQKLGAMNVKFDIITLNTMINAMFKVRRREEANDLFAAVSASGLVPNASTYGIVIKNILKEGSVEEVDNMFSSMEKSGCAPSSRLINYIIRMLLEKGEIARAGNYLSKVDGKIISLEASTTSLLLSLFSREGKYRENIELLPAKYQFFNGFG

SEQ ID NO: 63 - protein, 597 aa, Triticum aestivum
MWWHIAQSSMVFFKEGKTGKACNLFHEMIHQGVDPDVVTYNLIIDALCKARAMDKAELVLQQMVDKGVQPNTVTYNCMIHGYSTSGQLKEAAKMFRKMTSHGLVPNAVTCNLLMTSLCKHGRSKEAAEIFYSMTAKGHKLDAVSYRILLHGYATEGCFADMIDLFNSMESNGFVADCHVFTILIDAYAKRGMMDEAMLIFTEMREKGVSPNVVTYSTVIAAFCRLRRLANAMDKFNEMTDMGVQPDTTVYHSLIQGFCMHGDLVKVKEFVSEMMNKGIPRPDIAFFNSVINSLCKEGRVMNAQGIFDLVIGMGERPNVITFSSLIDGYGLVGQMGEALGVLDAMVSAGIEPNVVTYSSILDGYCRNGRINDALILFREMPRKRIKPNTVTYGIMLDGLFRAGRTVAAREMFHEMTERGIPVSISIYNIILGGLCKNNCADEAIALFQKLGAMNVKFDIITLNTMINAMFKVRRREEANDLFAAVSASGLVPNASTYGIVIKNILKEGSVEEVDNMFSSMEKSGCAPSSRLINYIIRMLLEKGEIARAGNYLSKVDGKIISLEASTTSLLLSLFSREGKYRENIELLPAKYQFFNGFG

SEQ ID NO: 64 - protein, 356 aa, Triticum aestivum
MLFPDEFLQTNKKICQSLARKIFRVFGIYLPFLKFYFTVYKRAFEIGTGYSSSRPFSLSQCRARARPCLASPSAAAAAHRPPPRQCPASTTPPPPPPSHSPTSASATSPPLSPTSPMPRLRLRRFSTAPMFHLLHRSSSSTSTSPPSRSWSPHAAFAAATERVRAGTLSPEDAHHLFDELLRQATPVTGRSLNGFLSALARAPASASCIRDGPALAVALFNRVCREEASQQVAPLTVHTYGILMGCFCGARRPDLGLALFGRFLRKGLKTNEIIATTFLKCLCSAKRTDEAVNLLLHRMPELGCVPNAISYSIVLKSLCENSMSQRALDLLQTVAEGGGACSLNVVAYSTVIHGFF

SEQ ID NO: 65 - protein, 193 aa, Triticum aestivum
MIVRLSGHPLVRDSLNEAVNLLLHRMPELGCVPNAISYSIVLKSLCENSMSQRALNLLQTVAEGGGACSLNVVAYNTVIHGIFKEGKTGKACNLFHEMIHQGVDPDVVTYNLIIDALCKARAMDKAELVLQQMVDKGVQPNTVTYNCMIHGYSTSGQLKEAAKMFRKMTSHGLVPNAVTCNSLMTSLCKHGRS

SEQ ID NO: 66 - protein, 824 aa, Triticum aestivum
MPRLRLRRFSTAPMFHLLHRSSSSTSTSPPSRSWSPHAAFAAATERVRAGTLSPEDAHHLFDELLRQATPVTGRSLNGFLSALARAPASAACIRDGPALAVALFNRVCREEASQQVAPLTVHTYGILMGCFCGARRPDLGLALFGRFLRTGLKTNEIIATTFLKCLCSAKRTDEAVNLLLHRMPELGCVPNAISYSIVLKSLCENSMSQRALDLLQTVAEGGGACSLNVVAYSTVIHGFFKEGKTGKACNLFHEMIHQGVDPDVVTYNLIIDALCKARAMDKAELVLQQMVDKGVQPNTVTYNCMIHGYSTSGQLKEAAKMFRKMTSHGLVPNAVTCNLLMTSLCKHGRSKEAAEIFYSMTAKGHKLDAVSYRILLHGYATEGCFADMIDLFNSMESNGFVADCHVFTILIDAYAKRGMMDEAMLIFTEMREKGVSPNVVTYSTVIAAFCRLRRLANAMDKFNEMTDMGVQPDTTVYHSLIQGFCMHGDLVKVKEFVSEMMNKGIPRPDIAFFNSVINSLCKEGRVMNAQGIFDLVIGMGERPNVITFSSLIDGYGLVGQMGEALGVLDAMVSAGIEPNVVTYSSILDGYCRNGRINDALILFREMPRKRIKPNTVTYGIMLDGLFRAGRTVAAREMFHEMTERGIPVSISIYNIILGGLCRNNCADEAITIFQKLGAMNVKFDIITLNTMINAMFKVRRREEANDLFAAVSASGLVPNASTYGIVIKNILKEGSVEEVDNMFSSMEKSGCAPSSRLINYIIRMLLEKGEIARAGNYLSKVDGKIISLEASTTSLLLSLFSREGKYRENIELLPAKYQFFNGFG

SEQ ID NO: 67 - protein, 339 aa, Triticum aestivum
MHGDLVKVKEFVSEMMNKGIPRPDIAFFNSVINCLCKEGRVMNAQGIFDLVIGMGERPNVITFSSLIDGYGLVGQMGEALGVLDAMVSAGIEPNVVMYSSILDGYCRNGRINDALILFREMPRKRIKPNTVTYGIMLDGLFRAGRTVAAREMFHEMTERGISVSISIYNIILSGLCRNNCADEAIALFQKLGAMNVKFDIITLNTMINAMFKVRRREEANDLFAAVSASGLVPTASTYGIVIKNILKEGSVEEVDNIFSSMEKSGCAPSSRLINYIIRMLLEKGEIARAGNYLSKVDGKIISLEASTTSLLLSLFSREGKYRENIELLPAKYQFFNGFG

SEQ ID NO: 68 - protein, 356 aa, Triticum aestivum; identical to SEQ ID NO: 64

SEQ ID NO: 69 - protein, 597 aa, Triticum aestivum; identical to SEQ ID NO: 63

SEQ ID NO: 70 - protein, 597 aa, Triticum aestivum; identical to SEQ ID NO: 63

SEQ ID NO: 71 - protein, 356 aa, Triticum aestivum; identical to SEQ ID NO: 64

SEQ ID NO: 72 - protein, 824 aa, Triticum aestivum; identical to SEQ ID NO: 62

SEQ ID NO: 73 - protein, 409 aa, Triticum aestivum
MVSYGMDEAMHMFEVMRQQGVNPDVFGYQIIMDSLCKMGKMAAAMDIFNQMVNQGVSPNKAVYQCLVLGSCSHGHFVKAKELISEAVNRGLCSNSVFFYPVINDRCKEGKVKEAQDMFDFIVGIGHRPDVIMYNSLMDGYCHVGKVEEALRVLDAMKSAGLQPDVFTYGILINGYCKIGRIDEGLSLVREISLSGVKPTTIMYNIILDGLFCSGRTVPAKEKFHKMNESGIPVGVGTYNIVLSGLCKNNCTDEAIELFKKLRAVNVKINVITLTTMISAMFKTRRIEEAKDLFATISAIGLVPSVVTYSIMMTNFIKEGLLADADDMFSAMEKAGCAHNSRLLNQVVRVFLKNGEVVKAVTYLAKLDAKQLSVEASTVSLIVSLFSRKGKLREHVKLLPVKYQPPEMLD

SEQ ID NO: 74 - protein, 409 aa, Triticum aestivum; identical to SEQ ID NO: 73

SEQ ID NO: 75 - protein, 409 aa, Triticum aestivum; identical to SEQ ID NO: 73

SEQ ID NO: 76 - protein, 466 aa, Triticum aestivum
MTAKGQKPDIISYCTLLHGHAREGCFTDMIDLFNSMKSNGIAADCHVFTILIDTYAKRGMMDDAMHIFTEMQQQGVSPNVVTYSTVISALSRMGRLTDAMEKFNQMVALGVQPDRAIYQSLIQGFCMHGGLVKAKELVSQMINKGIPHPNIVFFNSVINSMCKEGRVMDAHDIFDLVIDIGDRPDDTSFNSLIDGYCLVGKMDKAFGMLNAMESVGVEPDIVTYSTLVNGYCRNGRIDDGLTLFREMMCKGVKPTTVTYGIILDGLFHSGRTVAAMKMFHQMIESGTTVTISTYSIILGGLCRNNCADEAIVLFQKLGAMIVKFSITILNTMINAMYKVQRKEEAKELFGTISASGLVPNECTYGVMIKNLLEEGSVEEADNMFSFMDRSGIVPSSRLMNDIIRMLLEKGEIAKAGYYLSKVDGKSISLEASTTSLMFSLFSRKSKYQEDMKLLPAKYQIFDGLVV

SEQ ID NO: 77 - protein, 873 aa, Triticum aestivum
MSRRIRLRRALLLRLKSGLRHSFTSPFSRLRIRLRRYSTAPMSRLRLRLPRGSSSPTTLIPRLRLLRRCSTSTSMSSPSRSWSPRDAFAAATERVRAGTLSLEDAHKLFDELLGQATPVPERSLNGFLAALARAPASGACIRDGPALAVALFNRVCREEAGAQVAALTVCTYNILMDCCCRARRPDLGLALFGCFLRKGLKTDQTGANTFLKCLCYAKRTDEAVNVLLHRMSELGCVPNAVSYNTVLKGLCDNSMSQRALDLLQMVAGKGGGCFPDVVAYSTVIHGFFKEGETGKACSLFHEMMQQGIVPSVVTYNSIIDALCKVREVDKAELVLRQMVAKGAQPDTVTYNCMINGYATSGRLKEAAKMFREMKSRGLTPNVVTCNSFLASLCKHRSSKEAAEFFDSMTAKGQKPDIISYCTLLHGHAREGCFTDMIDLFNSMKSNGIAADCHVFTILIDTYAKRGMMDDAMHIFTEMQQQGVSPNVVTYSTVISALSRMGRLTDAMEKFNQMVALGVQPDRATYQSLIQGFCMHGGLVKAKELVSQMINKGIPHPNIVFFNSVINSMCKEGRVMDAHDIFDLVIDIGDRPDDTSFNSLIDGYCLVGKMDKAFGMLNAMESVGVEPDIVTYSTLVNGYCRNGRIDDGLTLFREMMCKGVKPTTVTYGIILDGLFHSGRTVAAMKMFHQMIESGTTVTISTYSIILGGLCRNNCADEAIVLFQKLGAMNVKFSITILNTMINAMYKVQRKEEAKELFGTISASGLVPNECTYGVMIKNLLEEGSVEEADNMFSFMDRSGIVPSSRLMNDIIRMLLEKGEIAKAGYYLSKVDGKSISLEASTTSLMFSLFSRKSKYQEDMKLLPAKYQIFDGLVV

SEQ ID NO: 78 - protein, 873 aa, Triticum aestivum
MSRRIRLRRALLLRLKSGLRHSFTSPFSRLRIRLRRYSTAPMSRLRLRLPRGSSSPTTLIPRLRLLRRCSTSTSTSSPSRSWSPRDAFAAATERVRAGTLSLEDAHKLFDELLGQATPVPERSLNGFLAALARAPASGACIRDGPALAVALFNRVCREEAGAQVAALTVCTYNILMDCCCRARRPDLGLALFGCFLRKGLKTDQTGANTFLKCLCYAKRTDEAVNVLLHRMSELGCVPNAVSYNTVLKGLCDNSMSQRALNLLQMVAGKGGGCFPDVVAYSTVIHGFFKEGETGKACSLFHEMMQQGIVPSVVTYNSIIDALCKVREVDKAELVLRQMVAKGAQPDTVTYNCMINGYATSGRLKEAAKMFREMKSRGLTPNVVTCNSFLASLCKHRSSKEAAEFFDSMTAKGQKPDIISYCTLLHGHAREGCFTDMIDLFNSMKSNGIAADCHVFTILIDTYAKRGMMDDAMHIFTEMQQQGVSPNVVTYSTVISALSRMGRLTDAMEKFNQMVALGVQPDRAIYQSLIQGFCMHGGLVKAKELVSQMINKGIPHPNIVFFNSVINSMCKEGRVMDAHDIFDLVIDIGDRPDDTSFNSLIDGYCLVGKMDKAFGMLNAMESVGVEPDIVTYSTLVNGYCRNGRIDDGLTLFREMMCKGVKPTTVTYGIILDGLFHSGRTVAAMKMFHQMIESGTTVTISTYSIILGGLCRNNCADEAIVLFQKLGAMNVKFSITILNTMINAMYKVQRKEEAKELFGTISASGLVPNECTYGVMIKNLLEEGSVEEADNMFSFMDRSGIVPSSRLMNDIIRMLLEKGEIAKAGYYLSKVDGKSISLEASTTSLMFSLFSRKSKYQEDMKLLPAKYQIFDGLVV

SEQ ID NO: 79 - protein, 873 aa, Triticum aestivum; identical to SEQ ID NO: 78

SEQ ID NO: 80 - protein, 832 aa, Triticum aestivum
MSRLRLRLPRGSSSPTTLIPRLRLLRRCSTSTSTSSPSRSWSPRDAFAAATERVRAGTLSLEDAHKLFDELLGQATPVPERSLNGFLAALARAPASGACIRDGPALAVALFNRVCREEAGAQVAALTVCTYNILMDCCCRARRPDLGLALFGCFLRKGLKTDQTGANTFLKCLCYAKRTDEAVNVLLHRMSELGCVPNAVSYNTVLKGLCDNSMSQRALDLLQMVAGKGGGCFPDVVAYSTVIHGFFKEGETGKACSLFHEMMQQGIVPSVVTYNSIIDALCKVREVDKAELVLRQMVAKGAQPDTVTYNCMINGYATSGRLKEAAKMFREMKSRGLTPNVVTCNSFLASLCKHRSSKEAAEFFDSMTAKGQKPDIISYCTLLHGHAREGCFTDMIDLFNSMKSNGIAADCHVFTILIDTYAKRGMMDDAMHIFTEMQQQGVSPNVVTYSTVISALSRMGRLTDAMEKFNQMVALGVQPDRAIYQSLIQGFCMHGGLVKAKELVSQMINKGIPHPNIVFFNSVINSMCKEGRVMDAHDIFDLVIDIGDRPDDTSFNSLIDGYCLVGKMDKAFGMLNAMESVGVELDIVTYSTLVNGYCRNGRIDDGLTLFREMMCKGVKPTTVTYGIILDGLFHSGRTVAAMKMFHQMIESGTTVTISTYSIILGGLCRNNCADEAIVLFQKLGAMIVKFSITILNTMINAMYKVQRKEEAKELFGTISASGLVPNECTYGVMIKNLLEEGSVEEADNMFSFMDRSGIVPSSRLMNDIIRMLLEKGEIAKAGYYLSKVDGKSISLEASTTSLMFSLFSRKSKYQEDMKLLPAKYQIFDGLVV

SEQ ID NO: 81 - protein, 873 aa, Triticum aestivum; identical to SEQ ID NO: 78

SEQ ID NO: 82 - protein, 695 aa, Triticum aestivum
MDCCCRASRPDLGLAFFGRLLRTGLKTNEIVASTFLKCLCYANRKEEAVNVLLHRMPELGCVPDAFSYSIVLKSLCDNNTSQRGLLQMMAKEGGGCSPNVVAYSTVIHGFFKEGETGKACSLFHQMMQQGVVPNVVTYNSIIDALCKARAMDKAELVLRQMVANGAQPNEVTYTCMIHGYSTSGRLKEAAKMFREMKSRGLTPNTVTCGSLMTSLCKHGRSKEAREIFDSMTAKGHKPDIVSYRILLHGYASEGCFADMIDLCNSMESNGIAADCRVFTILIDAYAKRGMMDDAMHIFTEMQQRGVSPNVVTYSTVISALSRMGRLTDAMEKFNQMVALGVQPNIPVYWSLIQGFCMHGGLVKVKELVSQMINKGIPRPNIVFFNSVINGMCKEGRVMDAHDIFDLVIDLGGRPDVITFNSLIDGYCLARKLDKAFGMFNSMESVGVEPDIVTYSTLLDGYFKNRRINDGLALFREMPRKRIKPDIVTYGIMLDGLFRAGRTVAARTMFHEMIESGITVDIPTYNIVLRGLCRNNCTDEAIALFQKLGAMSMKFNIAILNTMINAMYKVRRREEANNLFAAISTSGLVPNQSTYAVMIINLLKDGAVEHASNMFSSMEKSGIVPSSRLINGIIRLLLENGEIAKAGIYLSKVDGNSISLEASTTSLMLSLFSRKGKYHEDMKLLPAKYQFFDGCS

SEQ ID NO: 83 - protein, 695 aa, Triticum aestivum; identical to SEQ ID NO: 82

SEQ ID NO: 84 - protein, 695 aa, Triticum aestivum
MDCCCRASRPDLGLAFFGRLLRTGLKTNEIVASTFLKCLCYANRKEEAVNVLLHRMPELGCVPDAFSYSIVLKSLCDNNTSQRGLLQMMAKEGGGCSPNVVAYSTVIHGFFKEGETGKACSLFHQMMQQGVVPNVVTYNSIIDALCKARAMDKAELVLGQMVANGAQPNEVTYTCMIHGYSTSGRLKEAAKMFREMKSRGLTPNTVTCGSLMTSLCKHGRSKEAREIFDSMTAKGHKPDIVSYRILLHGYASEGCFADMIDLCNSMESNGIAADCRVFTILIDAYAKRGMMDDAMHIFTEMQQRGVSPNVVTYSTVISALSRMGRLTDAMEKFNQMVALGVQPNIPVYWSLIQGFCMHGGLVKAKELVSQMINKGIPRPNIVFFNSVINGMCKEGRVMDAHDIFDLVIDLGGRPDVITFNSLIDGYCLARKLDKAFGMFNSMESVGVEPDIVTYSTLLDGYFKNRRINDGLALFREMPRKRIKPDIVTYGIMLDGLFCAGRTVAARTMFHEMIESGITVDIPTYNIVLRGLCRNNCTDEAIALFQKLGAMSMKFNIAILNTMINAMYKVRRREEANNLFAAISTSGLVPNQSTYAVMIINLLKDGAVEHASNMFSSMEKSGIVPSSRLINGIIRLLLENGEIAKAGIYLSKVDGNSISLEASTTSLMLSLFSRKGKYHEDMKLLPAKYQFFDGCS

SEQ ID NO: 85 - protein, 695 aa, Triticum aestivum; identical to SEQ ID NO: 82

SEQ ID NO: 86 - protein, 695 aa, Triticum aestivum
MDCCCRASRPDLGLAFFGRLLRTGLKTNEIVASTFLKCLCYANRKEEAVNVLLHRMPELGCVPDAFSYSIVLKSLCDNNTSQRGLLQMMAKEGGGCSPNVVAYSTVIHGFFKEGETGKACSLFHQMMQQGVVPNVVTYNSIIDALCKARAMDKAELVLRQMVANGAQPNEVTYTCMIHGYSTSGRLKEAAKMFREMKSRGLTPNTVTCGSLMTSLCKHGRSKEAREIFDSMTAKGHKPDIVSYRILLHGYASEGCFADMIDLCNSMESNGIAADCRVFTILIDAYAKRGMMDDAMHIFTEMQQRGVSPNVVTYSTVISALSRMGRLTDAMEKFNQMVALGVQPNIPVYWSLIQGFCMHGGLVKAKELVSQMINKGIPRPNIVFFNSVINGMCKEGRVMDAHDIFDLVIDLGGRPDVITFNSLIDGYCLARKLDKAFGMFNSMESVGVEPDIVTYSTLLDGYFKNRRINDGLALFREMPRKRIKPDIVTYGIMLDGLFRAGRTVAARTMFHEMIESGITVDIPTYNIVLRGLCRNNCTDEAIALFQKLGAMSMKFNIAILNTMINAMYKVRRREEANNLFAAISTSGLVPNQSTYAVMIINLLKDGAVEHASNMFSSMEKSGIVPSSRLINGIIRLLLENGEIAKAGIYLSKVDGNSISLEASTTSLMLSLFSRKGKYHEDMKLLPAKYQFFDGCS

SEQ ID NO: 87 - protein, 695 aa, Triticum aestivum; identical to SEQ ID NO: 82

SEQ ID NO: 88 - protein, 695 aa, Triticum aestivum
MDCCCRARRPDLGLALFGCILRTGLKIDQITANTLLKCLCYAKQTEEAVYVLLHRMSELSCVPDAFAYNIVLKSLCKGSRSQRAHDLLRTMAKDRGGCFPDVVTYTTVIHGFFKEGETGKACNLFHEMIHQGVEPDVATYNSVIDALCKARAMDKAEVVLQQMVDKGVQPDTVTYTCMINGYSTSGRLKEAAKMFREMKSRGLIPDIVTCNSFLASICKHGTSKEAAEFFDAMTAKGHKPNIVSYRILLHGYATEGCFPDMIDVFNSMESNGIAADCHVFNILIDAKRGMMDEAMLISSKMQERRVNPDVVTYSSIIAGLSRLGRLTEAMEKFNQMIALGVQPNKAVYHALIQGFCIDGDLAKAKQLVYEMMDRGIPRPNISFFSSVIKSLCQEGRVMDAHDIFDLVIDMGERPDGILFNSLIDGYCLVGKMDKALKVLDVMESVGVEPDVFTYSTLVNGYCRNGRIDDGLTLFREMPRKRIKPDTVSYRVIMVGLFRAGRTVAARKMFHEMIESGTMVDIFTYNIILGGLCRNNCADEAIALFQKLRAMNVKFDITTLNTMINAMYNVQRKEEAKDLFATISASGLVPNESTYRVMIKNLLEEGSVEKADSMFSLMDKSGIAPSSRLLNDIIRMLLEKGEITKAGNYLSKVDGKSISLEASTTSLMLSLFSREGKYREDMKLLPAKYQFFDGFC

SEQ ID NO: 89 - protein, 695 aa, Triticum aestivum
MDCCCRTRRPDLGLALFGCILRTGLKIDQITANTLLKCLCYAKQTEEAVYVLLHRMSELSCVPDAFAYNIVLKSLCKGSRSQRAHDLLRTMAKDRGGCFPDVVTYTTVIHGFFKEGETGKACNLFHEMIHQGVEPDVATYNSVIDALCKARAMDKAEVVLQQMVDKGVQPDTVTYTCMINGYSTSGRLKEAAKMFREMKSRGLIPDIVTCNSFLASICKHGTSKEAAEFFDAMTAKGHKPNIVSYRILLHGYATEGCFPDMIDVFNSMESNGIAADCHVFNILIDAKRGMMDEAMLISSKMQERRVNPDVVTYSSIIAGLSRLGRLTEAMEKFNQMIALGVQPNKAVYHALIQGFCIDGDLAKAKQLVYEMMDRGIPRPNISFFSSVIKSLCQEGRVMDAHDIFDLVIDMGERPDGILFNSLIDGYCLVGKMDKALKVLDVMESVGVEPDVFTYSTLVNGYCRNGRIDDGLTLFREMPRKRIKPDTVSYRVIMVGLFRAGRTVAARKMFHEMIESGTMVDIFTYNIILGGLCRNNCADEAIALFQKLRAMNVKFDITTLNTMINAMYNVQRKEEAKDLFATISASGLVPNESTYRVMIKNLLEEGSVEKADSMFSLMDKSGIAPSSRLLNDIIRMLLEKGEITKAGNYLSKVDGKSISLEASTTSLMLSLFSREGKYREDMKLLPAKYQFFDGFC

SEQ ID NO: 90 - protein, 695 aa, Triticum aestivum; identical to SEQ ID NO: 88

SEQ ID NO: 91 - protein, 586 aa, Triticum aestivum
MAFSRRAKQACNLFHEMIHQGVEPDVATYNSVIDALCKARAMDKAEVVLQQMVDKGVQPDTVTYTCMINGCSTSGRLKEAAKMFREMKSRGLIPDIVTCNSFLASICKHGTSKEAAEFFDAMTAKGHEPNIVSYRILLHGYATEGCFPDMIDVFNSMESNGIAADCHVFNILIDAYAKRGMMDEAMLISSKMQERRVNPDVVTYSSIIAGLSRLGRLTEAMEKFNQMIALGVQPNKAVYHALIQGFCIDGDLAKAKQLVSEMMNRGIPRPNISFFSSVIKSLCQEGRVMDAHDIFDLVIDMGERPDGILFNSLIDGYCLVGKMDKALKVLDVMESVGVEPDVFTYSTLVNGYCRNGRIDDGLTLFREMPRKRIKPDTVSYRVIMVGLFRAGRTVAARKMFHEMIESGTMVDIFTYNIILGGLCRNNCADEAIALFQKLRAMNVKFDITTLNTMINAMYNVQRKEEAKDLFATISASGLVPNESTYRVMIKNLLEEGSVEKADSMFSLMDKSGIAPSSRLLNDIIRMLLEKGEIAKAGNYLSKVDGKSISLEASTTSLMLSLFSREGKYREDMKLLPAKYQFFDGFC

SEQ ID NO: 92 - protein, 695 aa, Triticum aestivum; identical to SEQ ID NO: 89

SEQ ID NO: 93 - protein, 695 aa, Triticum aestivum; identical to SEQ ID NO: 88

SEQ ID NO: 94 - protein, 695 aa, Triticum aestivum; identical to SEQ ID NO: 89

SEQ ID NO: 95 - protein, 792 aa, Triticum aestivum
MVFPRRICRGHGARPRRDAQTGGRTPPVRPIATTDHPGPRALPAWIFLAALARATPSAACKDGPSLALALFNRVCREEAGRRVAPPTVHTYGILMNCCCLVRRPDLGLALFGRLLRTGLKTNEIVASTILKCLCCAKRTDEAVNVLLHRMSDLGCVPNVFSYNRVLKSLCEDGRSQRALDLLRVMAKGDGDGCSPCVVSYSTVIYGFFKEGKVGKACNLFHEMTQQGIVSDVVTYNSIIDALCKARAMDKAELFLRQMVDDDIRPNGVTYTAIIHGYSTLGQWKKATQMFREMTSRGLVPNTVTWNSFMASLCKHGRSKEVAELLYSMAVKGHKPNVVSYSILLHGYATEGCFADMVNLFNSMVGKGIVPDHHVFNIFINAYAKCGMMDEAMHMLTEMREQGMSPDMCTYATIIAALCRMGRLADAVDNFNQMIGKGVQPSKVVYRSLIQGFCTHGDLVKAKEFISEMTDKCICRPTIVFFSSIMHSLCNEGRVIDAHHIFDLVIDIGERPDLIAFNTLIDGYCLVGNMEKALGVLDSMVSAGIEPTVVTYSSLISGYCKSGRLDDGVILFREMEHKRVKPDTVTYNIILDGLFHAGGTIAAKKLFNEMVESGTVVSISTYRIVLGGLCRNNCTNEAIVLFQKLGAMNVKFDIAILNTMINAMYKVQRREEANDLFASLPACGLVPNASTYGVVIQNLLKEGPLEEADNMFSSMEKSGCVPSSRLINDIIRTLLEKGEIVKAANYMSKIDGKIISFEASTTSLMLSLFSEKGKYQEQLQLLPAKYHFFGGVI

SEQ ID NO: 96 - protein, 792 aa, Triticum aestivum; identical to SEQ ID NO: 95

SEQ ID NO: 97 - protein, 792 aa, Triticum aestivum; identical to SEQ ID NO: 95

SEQ ID NO: 98 - protein, 792 aa, Triticum aestivum; identical to SEQ ID NO: 95

SEQ ID NO: 99 - protein, 792 aa, Triticum aestivum; identical to SEQ ID NO: 95

SEQ ID NO: 100 - protein, 792 aa, Triticum aestivum; identical to SEQ ID NO: 95

SEQ ID NO: 101 - protein, 882 aa, Triticum aestivum
MPSRIPPPMPRRICVWLRCSSPSSSCTYPDSGLRHPSCLTSPLSGLRLRRSFTTPMSNLRLRCSFTTPMSNLRLFRRSSSSTSTPTSPSSRSWSPHAAFAAATERVRAGTLNQDDTHNLFDELLRQAIPVPGRSLNGFLAALARATSSAACIRDGPALTVALFNRVCREQAGPRVAPLTVHTYNILMDCCCRASRPDLGLAFFGRLLRTGLKTNEIVATTFLKCLCYAKRTDEAVNVLLHRMPELGCVPDAFAYSTVLKSLCDNSMSQRGLDLLHMMAKEGGGCSPNVVAYSTVIHGFFKEGETGKACNLFHEMMQQGVEPNVWTYSSIIDALCKARAMDKAELVLQQMVNKGVQPNNVTYNCMIHGYSTSGWWKEVVKLFREMKSRGLIPDIFTCNSLMTYLCKHGRSKEAAEFFDAVTAKGHRDVISYCILLHGYANEGCFADMIDLFNSMQRNGIAANCHVFNILINGYAKRGMTEEAMLIFTKMWEKGVSPDVVTYSIVIAALSRMGRLTDAMEKFNQMIAMGIQPNTAVYHSLIQGFCIDGDLVKAKQLVSEMMNRGIPRPNIVFFNSVINSLCKEGRVMDAHDVLDLVVGIGERPNVITFSSLIDGYCSVGNMDKAFKILDVMESVGVEPNVVTYSALLDGYSKNRRIDDALTLFREMPRKRIKPDTVTCGIMLDGLFRAGRTVAAMEMFHEMTESGTTVDIFIYNIILGGLCRNNCVDEAIALFQKLRAMNVKFNIEILNTMINAMYKVQRKEEAKELFATISANGLVPNESTYAVMIRNLLKDGAVEDADNMFSSMDNSGIVPSSRLINDIIRMLLEKGEIAKAGNYLSKVDGKSISLEASTTSLMLSLFSRKGKHQEDIKLLPAKYQIFDGFS

SEQ ID NO: 102 - protein, 544 aa, Triticum aestivum
MDKAELVLQQMVNKGVQPNNVTYNCMIHGYSTSGWWKEVVKLFREMKSRGLIPDIFTCSSLMTYLCKHGRSKEAAEFFDAVTAKGHRDVISYCILLHGYANEGCFADMIDLFNSMQRNGIAANCHVFNILINGYAKRGMTEEAMLIFTEMWEKGVSPDVVTYSIVIAALSRMGRLTDAMEKFNQMIAMGIQPNTAVYHSLIQGFCIDGDLVKAKQLVSEMMNRGIPRPNIVFFNSVINSLCKEGRVMDAHDVLDLVIGIGERPNVITFNSLIDGYCLVGNMDKAFKILDVMESVGVEPNVVTYSALLDGYSKNRRIDDALTLFREMPRKRIKPDTVTYGIMLDGLFRAGRTVAAMEMFHEMTESGTTVDILIYNIILGGLCRNNCVDEAIALFQKLRAMNVKFNIEILNTMINAMYKVQRKEEAKELFATISANGLVPNESTYAVMIRNLLKGGAVEDADNMFSSMDNSGIVRSSGLINDIIRMLLKKGEIAKAGNYLSKVDGKSISLEASTTSLLLSLFSRKGKHQVDIKLLPAKYQFFDGFG

SEQ ID NO: 103 - protein, 544 aa, Triticum aestivum; identical to SEQ ID NO: 102

SEQ ID NO: 104 - protein, 544 aa, Triticum aestivum; identical to SEQ ID NO: 102

SEQ ID NO: 105 - protein, 219 aa, Triticum aestivum
MPRKRIKPDTVTYGIMLDGLFRAGRIVAAMEMFHEMTESGTTVDILIYNIILGGLCRNNCVDEAIALFQKLRAMNVKFNIEILNTMINAMYKVQRKEEAKELFATISANGLVPNESTYAVMIRNLLKDGAVEDADNIFSSMDNSGIVPSSRLINDIIRMLLEKGEIAKAGNYLSKVDGKSISLEASTTSLMLSLFSRKGKHQEDIKLLPAKYQFFDGFG

SEQ ID NO: 106 - protein, 789 aa, Triticum aestivum
MVSPRRLCRGHGARPCRDAQPGGRTPPVQPIATAGHSGPRALPGRLPCRPRPCARLSCLQRWPRPRHRPLQPRMPRRSRPAGGAAHSLHLRHPDELLLPRASSGPRACLIWPPPKDRPQTNEIVASTVLKCLCCAKRTDEAVNVLIHRMSDLGCVPNEFSYKTVLKSLCEDSRSQRALDLLRVMAKGDGCSPCVVSYSTVIYGFFKEGKVGKACNLFHEMTQQGVVSDVVTYNSIIDALCKARAMDKAELFLRQMVDDDIRPNGVTYNAMIHGYSTLGQWKKATQMFREMTSRGLVPDTVTWNSCMASLCKHGRSREAAELLYSMAAKGHKPNVVSYSTLLHGYANEGCFADMVNLFNSMVGKGIVPDHHVFNIFINAYAKCGMMDEVMHMLTEMREQGMSPDVCTYATIIAALCRMGRLADAVDNFNQMIGKGVQPSKVVYRSLIQGFCTHGDLVKAKEFIFEMTDKCICRPTIVFFNSIMHSLRNEGRVIDAHHIFDLVIDIGERPDLIAFNTLIDGYCLVGNMEKALGVLDSMVSAGIEPTVVTYSSLISGYCKSGRLDDGVILFREMEHKRVKPDTVAYNIILDGLFHAGATIAAKKLFNEMIESGTAVSISTYRIVLGGFCRNNCTDEAIVLFQKLGAMNVKFDIAILNTMINAMYKVQRREEANDLFASLPACGLVPNASTYGVVIQNLLKEGSLEEADNMFSSMEKSGCAPSSRLINYIIRTLLEKGEIVNAANYMSKVDGKIISFEASTTSLLLSLFSEKGKYQEQLQLLPAKYQFFGGVI

SEQ ID NO: 107 - protein, 716 aa, Triticum aestivum
MPRRSRQAGGAAHSLHLRHPDELLLPRASSGPRACLIWPPPKDRPQTNEIVASTVLKCLCCAKRTDEAVNVLIHRMSDLGCVPNEFSYKTVLKSLCEDSRSQRALDLLRVMAKGDGCSPCVVSYSTVIYGFFKEGKVGKACNLFHEMTQQGVVSDVVTYNSIIDALCKARAMDKAELFLRQMVDDDIRPNGVTYNAMIHGYSTLGQWKKATQMFREMTSRGLVPDTVTWNSCMASLCKHGRSREAAELLYSMAAKGHKPNVVSYSTLLHGYANEGCFADMVNLFNSMVGKGIVPDHHVFNIFINAYAKCGMMDEVMHMLTEMREQGMSPDVCTYATIIAALCRMGRLADAVDNFNQMIGKGVQPSKVVYRSLIQGFCTHGDLVKAKEFIFEMTDKCICRPTIVFFNSIMHSLCNEGRVIDAHHIFDLVIDIGERPDLIAFNTLIDGYCLVGNMEKALGVLDSMVSAGIEPTVVTYSSLISGYCKSGRLDDGVILFREMEHKRVKPDTVAYNIILDGLFHAGATIAAKKLFNEMIESGTAVSISTYRIVLGGFCRNNCTDEAIVLFQKLGAMNVKFDIAILNTMINAMYKVQRREEANDLFASLPACGLVPNASTYGVVIQNLLKEGSLEEADNMFSSMEKSGCAPSSRLINYIIRTLLEKGEIVNAANYMSKVDGKIISFEASTTSLLLSLFSEKGKYQEQLQLLPAKYQFFGGVI

SEQ ID NO: 108 - protein, 789 aa, Triticum aestivum; identical to SEQ ID NO: 106

SEQ ID NO: 109 - protein, 789 aa, Triticum aestivum
MVSPRRLCRGHGARPCRDAQPGGRTPPVRPIATAGHSGPRALPGRLPCRPRPCARLSCLQRWPRPRHRPLQPRMPRRSRPAGGAAHSLHLRHPDELLLPRASSGPRACLIWPPPKDRPQTNEIVASTVLKCLCCAKRTDEAVNVLIHRMSDLGCVPNEFSYKTVLKSLCEDSRSQRALDLLRVMAKGDGCSPCVVSYSTVIYGFFKEGKVGKACNLFHEMTQQGVVSDVVTYNSIIDALCKARAMDKAELFLRQMVDDDIRPNGVTYNAMIHGYSTLGQWKKATQMFREMTSRGLVPDTVTWNSCMASLCKHGRSREAAELLYSMAAKGHKPNVVSYSTLLHGYANEGCFADMVNLFNSMVGKGIVPDHHVFNIFINAYAKCGMMDEVMHMLTEMREQGMSPDVCTYATIIAALCRMGRLADAVDNFNQMIGKGVQPSKVVYRSLIQGFCTHGDLVKAKEFIFEMTDKCICRPTIVFFNSIMHSLRNEGRVIDAHHIFDLVIDIGERPDLIAFNTLIDGYCLVGNMEKALGVLDSMVSAGIEPTVVTYSSLISGYCKSGRLDDGVILFREMEHKRVKPDTVAYNIILDGLFHAGATIAAKKLFNEMIESGTAVSISTYRIVLGGFCRNNCTDEAIVLFQKLGAMNVKFDIAILNTMINAMYKVQRREEANDLFASLPACGLVPNASTYGVVIQNLLKEGSLEEADNMFSSMEKSGCAPSSRLINYIIRTLLEKGEIVNAANYMSKVDGKIISFEASTTSLLLSLFSEKGKYQEQLQLLPAKYQFFGGVI

SEQ ID NO: 110 - protein, 390 aa, Triticum aestivum
MSPDVCTYATIIAALCRMGRLADAVDNFNQMIRKGVQPSKVVYRSLIQGFCTHGDLVKAKEFIFEMTDKCICRPTIVFFNSIMHSLCNEGRVIDAHHIFDLVIDIGERPDLIAFNTLIDGYCLVGNMEKALGVLDSMVSAGIEPTVVTYSSLISGYCKSGRLDDGVILFREMEHKRVKPDTVAYNIILDGLFHAGATIAAKKLFNEMIESGTAVSISTYRIVLGGFCRNNCTDEAIVLFQKLGAMNVKFDITILNTMINAMCKVQRREEANDLFASLPACGLVPNASTYGVVIQNLLKEGSLEEADNMFSSMEKSGCAPSSRLINYIIRTLLEKGEIVNAANYMSKVDGKIISFEASTTSLLLSLFSEKGKYQEQLQLLPAKYQFFGGVI

SEQ ID NO: 111 - protein, 716 aa, Triticum aestivum; identical to SEQ ID NO: 107

SEQ ID NO: 112 - protein, 789 aa, Triticum aestivum; identical to SEQ ID NO: 106

SEQ ID NO: 113 - protein, 758 aa, Triticum aestivum
MPTARLSSIFTSSFKAPSRERRAPLAALAAATERVRAGTLSQEDAHHLFDELLSQAATVPVRGLNNFLAALARAPPGLLYRGAGARVVSPTCCTYSILMDCCCRAGRPDLVLAFFGRLLRLGLRFEEVIPFNNLLKGLCQAKRSNEALDMLLHRMPELDCAPDVFSFNIVINGCFKEGEVDKACNLFHEMPQLGVQPDVVTYTSIMDALSKSGAMDKAEVLLRQMVDQGIEPNIITYTSLIHGYSTSGQWKAAVRIFKEMASAGVRPNSVTLNSFIDSLCKHRKTKEARDIFDSMAAKGHKPDIFSYSTMLNWYAKEGCFDDMTDLFNSMVRNGIVPDHHVFNILINAYARRGLMDKAMHMFEVMRQQGVNPNVVDYVVVMDSLCKMGKMAAAMDIFNQMVNQGVSPNKAVYQCLVLGSCSHGHFVKAKELISEAVNRGLCSNSVFFYPVINDRCKEGKVKEAQDMFDFIVGIGHRPHVIMYNSLMDGYCLVGKVEEALRVLDAMKSAGLQPDLFTYGILINGYCKIGRIDEGLSLVREISLSGVKPTTIMYNIILDGLFCSGRTVPAKEKFHKMNESGIPVGVGTYNIVLSGLCKNNCTDEAIELFKKLRAVNVKINVITLTTMISAMFKTRRIEEAKDLFAAISAIGLVPSVVTYSITMTNFIKEGLLADADDMFSAMEKAGCAHNSRLLNQVVRVFLKNGEVVKAVTYLAKLDAKQLSVEASTVSLIVSLFSRKGKLREHVKLLPVKYQPPEMLD

SEQ ID NO: 114 - protein, 768 aa, Triticum aestivum
MPTARLSSISTSSFRAPSRAPLAALAAATERVRAGTLSREDAHHLFDELLGQAAPVPERGLNNFLAALARAPPSSAYSDGPGLAIALFNRMSRCAGARVVSPTLCTYSILMDCCCRAGCRELVVAFFGRLIKLGLRLNVIPFNNLLKGLCQAKRTNEAVDLLLHRTPELDCVPNVFSYSIVINGCFKQGEVDKACNLFHQMIQLGVQPNLVTYNSIIDALSKSGAMDKAEVVLRQMVDQGIGPNVMTYTSLIHGYSTSGQWKEAVRLFKKMIGLGALPDTVMWNSFMDSLCKHRRTKDARDIFDSMAAKGQKPDIFSYSIMLNGYAKEGYFEDMTDLFNLMVRNGIVPNHHVFNILINAYAKRGLMDEAMHMFEVMRQQGVNPNVDYLVIMDSLCKMGRMDAALDKFNQMVNQGVSPNKAVYQCLVLGSCSHGHFVKAKELISEAINRGLFSNSVFFYPVINDLCKEGKVKEAQDMFNFIVGIGQRPDVIMYNSLMDGYCLVGKVEEALRVLAAMKSAGLQPTAVTYGILLNGYCKSGRIAAGLSLFMEMSLSGVKPTTIMYNIILDGLFCSGRTVSAKEEFDTMIESGIPVNVRTYNIVLSGLCRNNCTGEAIELFKKLRAMNVKINVITLNTMISAMFKTRRIEEAKDLFATISAIGLVPSVVTYSVMMTNFIKEGLLAEADDMFLAMEKAGCAPDSRLLNHVVRVLLENGAVVKAVTYLTKLDAKQLSLEASTVSFIVSLFSRKGKLREHVKLLPVKYQPPEMLG

SEQ ID NO: 115 - protein, 831 aa, Triticum aestivum
MSSIHLRHCSTMPMSRVCLRRRLSSSSSFSNCTSPPSPTWSPHAAFAAATERVRAGTLSPQDAHHLFDVLFQQAIRVPERSLDGFLAALSHATSSEACRDGPALALTLFNRVCREEAGMRVALPTIFTYGILMNCCCRVRRPDLGLAFFGCILRAGLKTNQIAANTVIKCLCCAKHTDEAVNMLLHRMSDLGCVPDAFSYNTILKSLCEDGRSLQALDLLLQMVSKEGGACSPDMVAYSTVIHGFLKEGKVDKACNLFNEMMRQGVVPDVVTYSSIIDALCKAGAMHKAELFLRQMVDNGVRPDEVTYTSMIHGYSTLGRLKEVRKMFREMTSCGLIPDIVTWNSFMDSLCKHGRTKEAAKVFFSMAAKGNKPNIVSYTILLHGYANEGSFADMMSLFNSMKGGGIVANCKVFNILIGAYAKRGLIDEAMLILTEMRGQGLSPDVVTYSTLISAHWRMGKLTDAMDNFSQMVVGTGVQPDTVFYHSLVQFLCTHGDLVKAKELISEMMNKGIARPNTALFSSIMDSLCNEGRVIDAHHIFDLVIDIGEKPDISMFSTLIDGYCLVGEMDKACGVLDAMVSAGIEPNVITYSTLVSRYCKRGRIDDGLILFRQMLHKKVKPTTVTYETILNGLFRAGRTADAKKMFHEMIESGIMVSISAYNIILGGLCRNNCADEAIVLFQKLRAMNVKFNITTLNTIINALYKVERREEANDLFAALPASGLVPNASTYGVMVQNLLKEGAVEEADSMFSSMEKSGCAPSSRLINDVIRTLLEKGEIVKAGKYMSKVDGKSISLQASTSSLLLSLFSGNGKYREQLQLLPAKYQFFNGIS

SEQ ID NO: 116 - protein, 831 aa, Triticum aestivum; identical to SEQ ID NO: 115

SEQ ID NO: 117 - protein, 831 aa, Triticum aestivum; identical to SEQ ID NO: 115

SEQ ID NO: 118 - protein, 571 aa, Triticum aestivum
MMRQGVVPDVVTYSSIIDALCKAGAMHKAELFLRQMVDNGVRPDEVTYTSMIHGYSTLGRLKEVRKMFREMTSCGLIPDVVTWNSFMDSLCKHGRTKEAAKVFFSMAAKGNKPNIVSYTILLHGYANEGSFADMMSLFNSMKGGGIVANCKVFNILIGAYAKRGLIDEAMLILTEMRGQGLSPDVVTYSTLISAHWRMGKLTDAMDKFSQMVVGMGVQPDTVFYHSLVQFLCTHGDLVKAKELISEMMNKGIARPNTALFSSIMDSLCNEGRVIDAHHIFDLVIDIGEKPDISMFSTLIDGYCLVGEMDKACGVLDAMVSAGIEPNVITYSTLVSRYCKRGRIDDGLILFRQMLHKKVKPTTVTYETILNGLFRAGRTADAKKMFHEMIESGIMVSISAYNIILGGLCRNNCADEAIVLFQKLRAMYVKFNITTLNTIINALYKVERREEANDLFAALPASGLVPNASTYGVMVQNLLKEGAVEEADSMFSSMEKSGCAPSSRLINDVIRTLLEKGEIVKAGKYMSKVDGKSISLEASTSSLLLSLFSGNGKYREQLQLLPAKYQFFNGIS

SEQ ID NO: 119 - protein, 243 aa, Triticum aestivum
MSSIHLRHCSTMPMSRVCLRRRLSSSSFSNCTSPPSPTWSPHAAFAAATERVRAGTLSPQDAHHLFDVLFQQAIRVPERSLDGFLAALSHATSSEACRDGPALALTLFNRVCREEAGMRVAPHTIFTYGILMNCCCRVRRPDLGLAFFGRILRAGLKTNQIAANTVIKCLCCAKHTDEAVNMLLHRMSDLGCVPDAFSYNTVLKSLCEDGRSLQALDLLLQMVAPPTWWLITRSSMASLRKVK

SEQ ID NO: 120 - protein, 243 aa, Triticum aestivum; identical to SEQ ID NO: 119

SEQ ID NO: 121 - protein, 571 aa, Triticum aestivum; identical to SEQ ID NO: 118

SEQ ID NO: 122 - protein, 571 aa, Triticum aestivum; identical to SEQ ID NO: 118

SEQ ID NO: 123 - protein, 243 aa, Triticum aestivum; identical to SEQ ID NO: 119

SEQ ID NO: 124 - protein, 758 aa, Triticum aestivum
MPTARLSSIFTSSFKAPSRERRAPLAALAAATERVRAGTLSQEDAHHLFDELLSQAATVPVRGLNNFLAALARAPPGLLYRGAGARVVSPTCCTYSILMDCCCRAGRPDLVLAFFGRLLRLGLRFEEVIPFNNLLKGLCQAKRSNEALDMLLHRMPELDCAPDVFSFNIVINGCFKEGEVDKACNLFHEMPQLGVQPDVVTYTSIMDALSKSGAMDKAEVLLRQMVDQGIEPNIRTYSCLIHGYSTFGQWKEALRVFKEMASLGVVPDVVTLSSLIDSLCRHRRTKQAREIFDSMAAKGLKPNIVSYSTMLNGYVKEGSFEDMTGLFNSMVRNGIVPNHHIFNILINAYAKRGLMDEAMHMFEVMRQQGVNPDVFGYQIIMDSLCKMGKMDAALDKFNQMVNQGVSPNKAVYQCLVLGSCSHGDFVKAKELISEAVNRGLCSNSVFFYPVINDRCKEGKVKDAQDMFDFIVGIGHRPDVIMYNSLMDGYCLVGKVEEALRVLDAMKSAGLQPDVFTYGILINGYCKIGRIDDGLSLVREISLSGVKPTTIMYNIILDGLFCSGRTVPAKEKFHKMNESGIPVGVGTYNIVLSGLCKNNCTDEAIELFKKLRAVNVKINVITLTTMVSAMFKTRRIEEAKDLFVTISAIGLVPSVVTYSIMMTNFIKEGLLADADDMFSAMEKAGCAHNSRLLNQVVRVFLKNGEVVKAVTYLAKFDAKQLSVEASTVSLIVSLFSRKGKLREHVKLLPVKYQPPEMLD

SEQ ID NO: 125 - protein, 758 aa, Triticum aestivum; identical to SEQ ID NO: 124

SEQ ID NO: 126 - protein, 374 aa, Triticum aestivum
MGKLTDAMDKFSQMVVGTGVQPDTVVYHSLVQFLCTHGDLVKAKELISEMMNKSIARPNTALFSSIMDSLCNEGRVIDAHHIFDLVIDIGEKPDISMFSTLIDGYCLVGEMDKACGVLDAMVSAGIEPNVITYSTLVSRYCKRGRIDDGLILFRQMLHKKVKPTTVTYETTLNGLFRAGRTADAKKIFDEMIESGIMASISTYNIILGGLCRNNCADEAVVLFQKLRAMNVKFNITTLNTIINALYKVERREEANDLFAALPVSGLVPNASTYGVMVQNLLKEGAVEEADSMFSSMEKSGCAPSSRLVNDVIRTLLEKGEIVKAGKYMSKVDGKSISLEASTSSLLLSLFSGNGKYREQLQLLPAKYQFFDGIS

SEQ ID NO: 127 - protein, 828 aa, Triticum aestivum
MSSIHLRHCSTMPMSRVCLRRRLSSFSNCTSPPSPTWSPHAAFAAATERVRAGTLSPQDAHHLFDELFRQATPVPERSLDGFLAALGRATPSEACRDGPSLALTLFNRVCREEAGMRVAPPTIFTYGILMNCCCRMGRPDLGLAYFGRILRAGLKANQIAANTVIKCLCCAKHTDEAVNMLLHRMSDLGCVPDAFSYNTVLKSLCEDGRSLQALDLLLQMASKEGGACSPDMVAYSTVIHGFLKEGKVDKACNLFDEMMRQGVVPDVVTYSSIIDALCKAGAMYKAELFLRQMVDDGVRPDEVTYTSMIHGYSTLGRWKQVRKMFREMTSRGLIPDTVTWNSFMDSLCKHGRTKEAAEVFFSMAGKGSKPNIVSYTILLHGYANEGSFADMMSLFNSMKGGGIVANCKVFNILIGAYAKRGLIDEAMLILTEMRGQGLSPDVVTYSTLISAHWRMGKLTDAMDKFSQMVVGTGVQPDTVVYHSLVQFLCTHGDLVKAKELISEMMNKSIARPNTALFSSIMDSLCNEGRVIDAHHIFDLVIDIGEKPDISMFSTLIDGYCLVGEMDKACGVLDAMVSAGIEPNVITYSTLVSRYCKRGRIDDGLILFRQMLHKKVKPTTVTYETILNGLFRAGRTADAKKIFDEMIESGIMVSISTYNIILGGLCRNNCADEAVVLFQKLRAMNVKFNITTLNTIINALYKVERREEANDLFAALPVSGLVPNASTYGVMVQNLLKEGAVEEADSMFSSMEKSGCAPSSRLVNDVIRTLLEKGEIVKAGKYMSKVDGKSISLEASTSSLLLSLFSGNGKYREQLQLLPAKYQFFDGIS

SEQ ID NO: 128 - protein, 374 aa, Triticum aestivum; identical to SEQ ID NO: 126

SEQ ID NO: 129 - protein, 828 aa, Triticum aestivum; identical to SEQ ID NO: 127

SEQ ID NO: 130 - protein, 337 aa, Triticum aestivum
MRVAPPTIFTYGILMNCCCRMGRPDLGLAYFGRILRAGLKANQIAANTVIKCLCCAKHTDEAVNMLLHRMSDLGCVPDAFSYNTVLKSLCEDGRSLQALDLLLQMASKEGGACSPDMVAYSTVIHGFLKEGKVDKACNLFDEMMRQGVVPDVVTYSSIIDALCKAGAMYKAELFLRQMVDDGVRPDEVTYTSMIHGYSTLGRWKQVRKMFREMTSRGLIPDTVTWNSFMDSLCKHGRTKEAAEVFFSMAGKGSKPNIVSYTILLHGYANEGSFADMMSLFNSMKGGGIVANCKVFNILIGAYAKRGLIDEAMLILTEMRGQGLSPDVVTYSTLISAH

SEQ ID NO: 131 - protein, 337 aa, Triticum aestivum; identical to SEQ ID NO: 130

SEQ ID NO: 132 - protein, 828 aa, Triticum aestivum; identical to SEQ ID NO: 127

SEQ ID NO: 133 - protein, 828 aa, Triticum aestivum; identical to SEQ ID NO: 127

SEQ ID NO: 134 - protein, 813 aa, Triticum aestivum
MSRLHLLRRRCSTSISTSPPSRSWSPRAAFAAATERVRAGTLSPEDAHHLFDQLLRQSTPVPERSLNGFLAALVRTPASESCRDGPSLALALFNRVCREEAGLRVAPPTIFTYNILMNCCCLARRPDLGLAFFGRLLRTGLKTNQSFANTLLKCLCCAKQTDEAVSVLLHRMSDLGCVPDDFSYNTVLKSLCEDSRSRRALDLLQMMAKEGGVCSPDVVTYNTVIHGFFKEGEIGKACNLFHEMMQQGVVPNVVTYNSIIDALCKARAMDNAELFLRMMVDNGVPPDKVTYTSMIHGYSTLGRWKEATKKFREMTSRGLIPGIITWNSFMDSLCKHGRSKEVAEIFHSMSAKGHKPDIISYTTLLHGYANEGSFPDMMSLFKSMEGNGIVANCQVFNILIDAYAKRGMMDEAMLIFTEMLGQGVNPSVITYSIVIAALCRMGRLADAMDTFSQMISVGMKPDTVVYHSLIQGFSTHGDLVKAKELIYEMMNNGIPRPNSVFFSSIVNSLCKEGRVVDAHHIFDLVKDLGERPNIIMFTTLIDGYCLVGEMDKAFRVLDAMVLAGVEPDVVTYSTLVNGYCSNGRIDDGLILFREMLHKKVKPTTVTYNIILDRLFRAGRTVAAKKMLHEMIGSGTPVSMHTYGIFLRGLCRNDCTDEAIALFQKLGALNVNFDITILNSMINAMYRVQRREEANKLFAAISTSGLVPNASTYGIMIRNLLKEGSVEEAEDMFSSMEESDCALSSRLINDIIRTLLEKGDIVKAGKYMSKVDETSISLEASTSSLLLSLFSGKGKCREQIELLPAKYQIFDGIS

SEQ ID NO: 135 - protein, 813 aa, Triticum aestivum
MSRLHLLRRRCSTSISTSPPSRSWSPRAAFAAATERVRAGTLSPEDAHHLFDQFLRQSTPVPERSLNGFLAALVRTPASESCRDGPSLALALFNRVCREEAGLRVAPPTIFTYNILMNCCCLARRPDLGLAFFGRLLRTGLKTNQSFANTLLKCLCCAKQTDEAVSVLLHRMSDLGCVPDDFSYNTVLKSLCEDSRSRRALDLLQMMAKEGGVCSPDVVTYNTVIHGFFKEGEIGKACNLFHEMMQQGVVPNVVTYNSIIDALCKARAMDNAELFLRMMVDNGVPPDKVTYTSMIHGYSTLGGWKEATKKFREMTSRGLIPGIITWNSFMDSLCKHGRSKEAAEIFHSMSAKGHKPDIISYTTLLHGYANEGSFPDMMSLFKSMEGNGIVANCQVFNILIDAYAKRGMMDEAMLIFTEMLGQGVNPSVITYSIVIAALCRMGRLADAMDTFSQMISVGMKPDTVVYHSLIQGFSTHGDLVKAKELIYEMMNNGIPRPNSVFFSSIVNSLCKEGRVVDAHHIFDLVKDLGERPNIIMFTTLIDGYCLVGEMDKAFRVLDAMVLAGVEPDVVTYSTLVNGYCSNGRIDDGLILFREMLHKKVKPTTVTYNIILDRLFRAGRTVAAKKMLHEMIGSGTPVSMHTYGIFLRGLCRNDCTDEAIALFQKLGALNVNFDITILNSMINAMYRVQRREEANKLFAAISTSGLVPNASTYGIMIRNLLKEGSVEEAEDMFSSMEESDCALSSRLINDIIRTLLEKGDIVKAGKYMSKVDETSISLEASTSSLLLSLFSGKGKCREQIELLPAKYQIFDGIS

SEQ ID NO: 136 - protein, 813 aa, Triticum aestivum; identical to SEQ ID NO: 134

SEQ ID NO: 137 - protein, 813 aa, Triticum aestivum; identical to SEQ ID NO: 135

SEQ ID NO: 138 - protein, 813 aa, Triticum aestivum; identical to SEQ ID NO: 134

SEQ ID NO: 139 - protein, 813 aa, Triticum aestivum; identical to SEQ ID NO: 135

SEQ ID NO: 140 - protein, 703 aa, Triticum aestivum
MPAARLSSFKAPSRERRPPLAALAAATERVRAGTLSRQDAHHLFDELLSQAATVPVRKLNNFLAALARAPPSAACSDGPDLAIALFNRMSRGAGARVVSPTLSTYSILMDCCCRARRPELVVAFFGRLLRLGLRLDIISSSNLLKGLCQAKRSNEALDMLLHRMPELDCAPDVFSFNIVINGCFKEGEVDKACNLFHEMPQLGVQPDVVTYTSIMDALSKSGAMDKAEVLLRQMVDQGIEPNIKTYNCLIHGYSTFGQWKAAVRVFKEMASVGVQPNAVTLNSLIDSLCKHRRTKEAREILDSMAAKGLKPNIVSYSTMLNGYVKEGCFDDMTDLFNSMVRNGIVPNHHIFNILINAYAKRGVMDEAMHMFEVMRQQGVNPDVFSYQIVMDSLCKMGRMDAALDKFNQMVNQGVSPNKAVYQCLVLGSCSHGHFVKAKELISEVVNRGLCSNSVFFYPVINGLCKEGKVKEAQDMFDFILGIGQRPDVIMYTSLMDGYCLVGEVEKALSVLDAMKSAGLQPDDVVYATLLNGYCKIGRIADGLSLFREMSLSGVKPMTIIYNIILDGLFCSGRTVCAKEKFNTMTESGIPVGVDTYNILPLERFIRRFRKCSSNLGTLRKFGRFHFCPCAHSLTRTHPFPSRTHSPASTSPCPNPARWRRSSLSPASTPPPRPLRSLPSPLVAASPSPRPRCLAKIVFLVRSG

SEQ ID NO: 141 - protein, 703 aa, Triticum aestivum; identical to SEQ ID NO: 140

SEQ ID NO: 142 - protein, 275 aa, Triticum aestivum
MPRRSRPAGGILMGCFCGAHRPDLGLALFGRFLGTGLKTNKIVATTFLKCLCYAKRTDEAVNLLLRRMPELGCVPDAISYTIVLKSLCENSMSQRALDLLQMVAEGGGACSLNVVVYSTVIHGFFKEGETGKACNLFHEMIHQGVVPNVVTYSSIIDALCKARAMDKAELVLQQMVDSGAQPNNVTYNCMIHGYSTSGQLKEAAKMFRKMTSHGLVPNAVTCSSLMTSLCKHGRSKEAAEIFYSMTAKGHKPDAVSYRILLHGYANEGCFADMID

SEQ ID NO: 143 - protein, 275 aa, Triticum aestivum; identical to SEQ ID NO: 142

SEQ ID NO: 144 - protein, 807 aa, Triticum aestivum
MPAARLSSISTSSFKAPSREGRAPLAALAAATERVLAGTLSRQDAHHLFDELLSQAAAVPERGLNNSLAALARTPPSAACSDGPGLAIALFNRMSRGAGALVASSTLCTYSILMDCCCRAGRPDLVVAFFGRLLRLGLRLNVISFNNLLKGLCQAKRSNEALDLLLHRMPELDCAPDVFSFNIVINGCFREGEVDKACNLFHEMPQLGVQPDVVIYNSIIDTLSKSGAMDKAEVVLRQMVDKGIGPDVMTYNSLIHGYSTLGQWKAAVRVFKEMVSVGVLPNAVTLNSFMDSLCKHRRTKEARDIFDSMAAKGHKPNIASYSTMLNGYAKQGCFDDMTGLFNSMVQNGIVPNNHVFNILIRAYSTRGLMDKAMHMFEVMKQQGVNPNVVDYLVIMDSLCKMGRMDAALDKFNQMVNQGVSPDKVVYRCLVLGSCSHGHFVKAKELISKAVNRGLCSNSEFFYPVINDLCKEGKVKEAQDMFDFIVGIGQRPDVIMYNSLMDGYCLVGKVEEAVRVLDAMKSAGLQPTAVTYAILLNGYCKIGRIAAGLSLFMEMSLSGVKPTTIMYNIIPDGLFCSGRTVSAKEKFNTMIESGIPVGVDTYNIVLHGLCRNNCTDEAIDLFKKLCARNVKIDVITFNTVISAMFKTRRIEEAKDLFATIPAIGLVPSVVTYSLMMTNFIKEGSLAEADDMFLAMEKDGCAPDSRLLNQVVRVLLEKGAVVQAATYLAKLDAKQMSLEVSTISLIVYLFSRKGKLREHVKLLPMSTSLRRCPTDVTWWYSLIADRMSLPPPAVFENADNSSILLLPDV

SEQ ID NO: 145 - protein, 406 aa, Triticum aestivum
MDCCCRARRPDLGLALFGRFLRTGLKTNEIIANTFLKCLCYAKRTNEAINLLLHRMPELGCVPDAFSYNIVLKSLCENSMSQRALDLLQMVAEGGGACSLNVVAYSTVIHGFFKEGETGKACNLFHEMIHQGVVPNVVTYSSIIDALCKAREMDKAELVLQQMVDSGAQPNNVTYNCMIHGYSTSGQLKEAAKMFRKMTSHGLVPNAVTCSSLMTSLCKHGRSKEAAEIFYSMTAKGHKPDAVSYRILLHGYATEGCFADMIDLFNSMESNGFVADCHVFTILIDAYAKRGMMDEAMLIFTEMQEKGVSPNVVTYSTVIAALCRLGRLADAMDKFNEMIDMGVQPGTTVYHSLIQGFCMHVDLVKAKELVSDMISKGIPRPNIVFLQFSYKLFVQRRTGYGCTRYL

SEQ ID NO: 146 - protein, 298 aa, Triticum aestivum
MDAQDIFELVISIDGKPDVITFNSLIDGYCLVGKMDKAFGVLDAMVSAGIEPNVVTYNTLVNGYSRNGRIDDGLTLFRQMPRKRIKPDSATYGIILDGLFRAGRTVAARKMFHEMIESGITVSISTYNIILAGLSRNNCAEEAIDLYQKLVAMNVKFNISIINTMINAMYKVKRKEEAKDLFAAISASGLVPNASTYGVMIINILKDGAVEDANNMFSAMDRNGIAPCSRLINSIIRILLEKGEITMAGLYLSKLDGKNMLLEASTTSLMLSLFSRKGKYKEDVKFLPAKYQFFDGFG

SEQ ID NO: 147 - protein, 824 aa, Triticum aestivum
MSRLRLRRSSTTPMFHLLRRSSSSTSISPPSRSWSPEGAFAAATARVSAGTLSPEEAHHLFDELLRQGTPVPSRSLNGFLATLARAPASAAYSRDGPALALALFNRVCTEKAGSRVAHLTVHTYGILMDCCCRARRPDLGLALFGRFLRTGLKTNEIIANTFLKCLCYAKRTNEAINLLLHRMPELGCVPDAFSYNIVLKSLCENSMSQRALDLLQMVAEGGGACSLNVVAYSTVIHGFFKEGETGKACNLFHEMIHQGVVPNVVTYSSIIDALCKARAMDKAELVLQQMVDSGAQPNNVTYNCMIHGYSTSGQLKEAAKMFRKMTSHGLVPNAVTCSSLMTSLCKHGRSKEAAEIFYSMTAKGHKPDAVSYRILLHGYATEGCFADMIDLFNSMESNGFVADCHVFTILIDAYAKRGMMDEAMLIFTEMQEKGVSPNVVTYSTVIAALCRLGRLADAMDKFNEMIDMGVQPGTTVYHSLIQGFCMHVDLVKAKELVSDMISKGIPRPNIVFFNSVINYLCKEGRVMDAQDIFELVISIDGKPDVITFNSLIDGYCLVGKMDKAFGVLDAMVSAGIEPNVVTYNTLVNGYSRNGRIDDGLTLFRQMPRKRIKPDSATYGIILDGLFRAGRTVAARKMFHEMIESGITVSISTYNIILAGLSRNNCAEEAIDLYQKLVAMNVKFNISIINTMINAMYKVKRKEEAKDLFAAISASGLVPNASTYGVMIINILKDGAVEDANNMFSAMDRNGIAPCSRLINSIIRILLEKGEITMAGLYLSKLDGKNMLLEASTTSLMLSLFSRKGKYKEDVKFLPAKYQFFDGFG

SEQ ID NO: 148 - protein, 298 aa, Triticum aestivum; identical to SEQ ID NO: 146

SEQ ID NO: 149 - protein, 406 aa, Triticum aestivum; identical to SEQ ID NO: 145

SEQ ID NO: 150 - protein, 824 aa, Triticum aestivum; identical to SEQ ID NO: 147

SEQ ID NO: 151 - protein, 298 aa, Triticum aestivum; identical to SEQ ID NO: 146

SEQ ID NO: 152 - protein, 298 aa, Triticum aestivum; identical to SEQ ID NO: 146

SEQ ID NO: 153 - protein, 406 aa, Triticum aestivum; identical to SEQ ID NO: 145

SEQ ID NO: 154 - protein, 406 aa, Triticum aestivum; identical to SEQ ID NO: 145

SEQ ID NO: 155 - protein, 535 aa, Triticum aestivum
MMVLDLNVTYSSLIHGYSSSGHWKEAVRVFKEMTSRRVTADVHTYNMFMTFLCKHGRSKEAAGIFDTMAIKGLKPDNVSYAILLHGYAAEGCLVDMINLFNSMERDCILPDCRIFNILINAYAKSGKLDKAMLIFNEMQKQGVSPNAVTYSTVIHAFCKKGRLDDAVIKFNQMIDTGVRPDASVYRPLIQGFCTHGDLVKAKEYVTEMMKKGMPPPDIMFFSSIMQNLCTEGRVTEARDILDLIVHIGMRPNVIIFNLLIGGYCLVRKMADALKVFDDMVSYGLEPCNFTYGILINGYCKNRRIDDGLILFKEMLHKGLKPTTFNYNVILDGLFLAGQTVAAKEKFDEMVESGVSVCIDTYSIILGGLCRNSCSSEAITLFRKLSAMNVKFDITIVNIIIGALYRVERNQEAKDLFAAMPANGLVPNAVTYTVMMTNLIKEGSVEEADNLFLSMEKSGCTANSCLLNHIIRRLLEKGEIVKAGNYMSKVDAKSYSLEAKTVSLLISLFSRKGKYREHIKLLPTKYQFLEEAATVE

SEQ ID NO: 156 - protein, 788 aa, Triticum aestivum
MPRFSSTTPMSPPRLRLRLCARHSSSTSHPSRIWDPHAAFAAAAQRASSGTLTTEDAHHLFDELLRRGNPVQERPLNKFLAALARAPASASCCDGPALAVALFGRLSRDVGRRVAQPNVFTYGVLMDCCCRACRTDLVLAFFGRLLKTGLEANQVVFNTLLKGLCHTKRADEALDVLLHRMPELGCTPNVVAYNTVIHGFFKEGHVSKACNLFHEMAQQGVKPNVVTYNSVIDALCKARAMDKAEVVLRQMIDDGVGPDNVTYSSLIHGYSSSGHWKEAVRVFKEMTSRRVTADVHTYNMFMTFLCKHGRSKEAAGIFDTMAIKGLKPDNVSYAILLHGYAAEGCLVDMINLFNSMERDCILPDCRIFNILINAYAKSGKLDKAMLIFNEMQKQGVSPNAVTYSTVIHAFCKKGRLDDAVIKFNQMIDTGVRPDASVYRPLIQGFCTHGDLVKAKEYVTEMMKKGMPPPDIMFFSSIMQNLCTEGRVTEARDILDLIVHIGMRPNVIIFNLLIGGYCLVRKMADALKVFDDMVSYGLEPCNFTYGILINGYCKNRRIDDGLILFKEMLHKGLKPTTFNYNVILDGLFLAGQTVAAKEKFDEMVESGVSVCIDTYSIILGGLCRNSCSSEAITLFRKLSAMNVKFDITIVNIIIGALYRVERNQEAKDLFAAMPANGLVPNAVTYTVMMTNLIKEGSVEEADNLFLSMEKSGCTANSCLLNHIIRRLLEKGEIVKAGNYMSKVDAKSYSLEAKTVSLLISLFSRKGKYREHIKLLPTKYQFLEEAATVE

SEQ ID NO: 157 - protein, 258 aa, Triticum aestivum
MPRFSSTTPMSPPRLRLRLCARHSSCTSHPSRIWDPHAAFAAAAQRASSGTLTTEDAHHLFDELLRRGNPVQERPLNKFLAALARAPASASCCDGPALAVALFGRLSQDVRRRVAQPNVFTYGVLMDCCCRACRTDLALAFFGRLLKTGLEANQVVFNTLLKGLCHTKRADEALDVLLHRMPELGCTPDVVAYNTVIHGFFKEGHVSKACNLFHEMAQQGVKPNVVTYNSVIDALCKARAMDKAEVVLRQMIDDGVGP

SEQ ID NO: 158 - protein, 788 aa, Triticum aestivum; identical to SEQ ID NO: 156

SEQ ID NO: 159 - protein, 542 aa, Triticum aestivum
MPTGRLSSIFTSNATSSFRAPSPQPRAPLAALAAATERVRAGTLSRQDAHHLFDELLSQAATVPVRTLNNFLAALARAPPSAACGDGPALAIALFNRMSQGAGARVVSPTLCTYSILMDCCCRAGRPDLVVAFFGRLIRLGLRLNVIPFNNLLKGLCKAKRSNEALDLLLHRMPELDCAPDVFSYSIVINGCFKEGEVDKACNLFHGMIQLGVQPNVVIYTSIIDALSKCGAMDKAEVVFRQMVDKGIGPDVMTCTSLIHGYSISGRWKAAVRVFKEMISLGVVPDTVMWNSFVDSLCKHRRTKEARVIFDSMAAKGQKPDTVSYSIMLNGYVKEGCFDDMTGLFNSMLQNGVVPNHHIFNILINAYAKRGLMDEAMHMFEVMRQQGVNPDVVDYLVVMDSLCKMGRMDAALDKFNQMVNQGVSPNKAVYQCLVLGSCSHGDFVKAKELISEALNRGLCSNSVFFYPVINDLCKEGKVKEAQDMFDFIVGIGQRPDVIMYNSLMDGYCLVGKVEEALRVLDAMKSAGLQPDAIMYGILLNDH

SEQ ID NO: 160 - protein, 776 aa, Triticum aestivum
MPTGRLSSIFTSNATSSFRAPSPQPRAPLAALAAATERVRAGTLSRQDAHHLFDELLSQAATVPVRTLNNFLAALARAPPSAACGDGPALAIALFNRMSQGAGARVVSPTLCTYSILMDCCCRAGRPDLVVAFFGRLIRLGLRLNVIPFNNLLKGLCKAKRSNEALDLLLHRMPELDCAPDVFSYSIVINGCFKEGEVDKACNLFHGMIQLGVQPNVVIYTSIIDALSKCGAMDKAEVVFRQMVDKGIGPDVMTCTSLIHGYSISGRWKAAVRVFKEMISLGVVPDTVMWNSFVDSLCKHRRTKEARVIFDSMAAKGQKPDTVSYSIMLNGYVKEGCFDDMTGLFNSMLQNGVVPNHHIFNILINAYAKRGLMDEAMHMFEVMRQQGVNPDVVDYLVVMDSLCKMGRMDAALDKFNQMVNQGVSPNKAVYQCLVLGFCSHGDFVKAKELISETINRGLCSNNVFFYPVINDLCKEGKVKEAQDMFDFIVGIGQRPDVIMYNSLMDGYCLVGKVEEALRVLDAMKSAGLQPDAITYAILLNGYCKIGRIADGLSLFREMSLSGVKPTTIMYSIILDGLFRSGRTVSAKEKFNTMVESGLPVDVRTYNIVLHGLCRNNCTGEAIELFKKLCATNVKINVITFNTMISAMFKTRRIGEAKDLFATISAIGLVPSVVTYSVMTTNFIKEGLLAEADDMFLAMEKAGCAPNSRLLNHVVRVLLENGAVVKAATYLAKLDAKQLSLEASTVSLIVSLFSRKGKLREHVKLLPVKYQPPEMLD

SEQ ID NO: 161 - protein, 669 aa, Triticum aestivum
  misc_feature (28)..(28): Xaa can be any naturally occurring amino acid
MHQGVGCTDPSGRGQNPRPSATSHPSLXVHSLDSSAASQAARRRPGPPEFLSLLSLRRRHASSSSPLLRASVATPRRRRAVPPSAWLVPSIAGDATRARCGGARTVSLPGGQDPRQLRAELRWRRPAMPTGRLSSIFTSNATSSFRAPSPQPRAPLAALAAATERVRAGTLSRQDAHHLFDELLSQAATVPVRTLNNFLAALARAPPSAACGDGPALAIALFNRMSQGAGARVVSPTLCTYSILMDCCCRAGRPDLVVAFFGRLIRLGLRLNVIPFNNLLKGLCKAKRSNEALDLLLHRMPELDCAPDVFSYSIVINGCFKEGEVDKACNLFHGMIQLGVQPNVVIYTSIIDALSKCGAMDKAEVVFRQMVDKGIGPDVMTCTSLIHGYSISGRWKAAVRVFKEMISLGVVPDTVMWNSFVDSLCKHRRTKEARVIFDSMAAKGQKPDTVSYSIMLNGYVKEGCFDDMTGLFNSMLQNGVVPNHHIFNILINAYAKRGLMDEAMHMFEVMRQQGVNPDVVDYLVVMDSLCKMGRMDAALDKFNQMVNQGVSPNKAVYQCLVLGSCSHGDFVKAKELISEALNRGLCSNSVFFYPVINDLCKEGKVKEAQDMFDFIVGIGQRPDVIMYNSLMDGYCLVGKVEEALRVLDAMKSAGLQPDAIMYGILLNDH

SEQ ID NO: 162 - protein, 739 aa, Triticum aestivum
MPSEACRDGPFLALTLFNRVCREEAGMRVAPPTIFTYGILMNCCCRMGRPDLGLAYFGRILRAGLKANQIAANTVIKCLCCAKHSDEAVNMLLHRMSDLGCVPDAFSYNTVLKSLCEDGRSLQALDLLLQMASKEGGACSPDMVAYSTVIHGFLKEGKVDKACNLFDEMMRQGVVPDVVTYSSIIDALCKAGAMYKAELFLWQMVDDGVRPDEVTYTSMIHGYSTLGRWKQVRKMFREMTSRGLIPDTVTWNSFMDSLCKHGRTKEAAEVFFSMAGKGSKPNIVSYTILLHGYANEGSFADMMSLFNSMKGGGIVANCKVFNILIGAYAKRGLIDEAMLILTEMRGQGLSPDVVTYSTLISAHWRMGKLTDAMDKFSQMVVGTGVQPDTVVYHSLVQFLCTHGDLVKAKELISEMMNKSIARPNTALFSSIMDSLCNEGRVIDAHHIFDLVIDIGEKPDISMFSTLIDGYCLVGEMDKACGVLDAMVSAGIEPNVITYSTLVSRYCKRGRIDDGLILFRQMLHKKVKPTTVTYETTLNGLFRAGRTADAKKIFDEMIESGIMVSISTYNIILGGLCRNNCADEAIILFQKLRAMNVKFNITTLNTIIDALYKVERREEANDLFAALPASGLVPNASTYGVMVQNLLKEGAVEEADSMFSSMEKSGCAPSSRLVNDVIRTLLEKGEIVKAGKYMSKVDEKSISLEASTSSLLLSLFSGNGKYREQLQLLPAKYQFFDGIS

SEQ ID NO: 163 - protein, 825 aa, Triticum aestivum
MSRLRLRHCSCFTTPMSRIRLRRRLSSSTSRPTPSRSPRAAFAAATERVRAGTLSPQDAHHLFDELFQQATPVPERPLNGFLAALTRATPSEACRDGPALALSLFNRVCREEAGMRVAPPTIFTYGVLMNCCCRMRRPELGLAFFGRLLRTGLKADKIVANTVLKCLCCAKRADDAVKVLLHRMTELGCVPDAFSYAIVLKSLCDDNRSQQALYLLRMMAKEEGVCSPDVVTYNTVIHGFFKEGKIGKACNLFHEMTKQGFVPNVVTYNSVINALCKARAMDNAELFLRQMVDNGVQPNKVTYTSMIHGYSTLGQWKEATKLFREMTSSGLIPDIVTWNSFIDSLCKHGRSKEAAEIFHSMSAKGHKPDIISYTTLLHGYANEGSFPDMMSLFKSMEGDGIVANCQFFNILIDAYAKRGMMDEAMLIFTEMPGQGVNPNVVTYSTVVASLCRMGRLADAMNKFSEMIGTGVQPNTVVYHSLVQGLCTHGDLVKAKELISEMMNKGIPRPNIAFFSSIVHSLCKEGRVMDAHHIFDLVKDIGERSDIIMFNTLIDGYCLVGEMGKAVSVLDVMISAGIEPDIFTYNTLVNGYFKSGRIDDGLNLFREMSHKKIKPTTVTYNIILDGLFRAGRTVAAKKMLHELIGCGTTVSLSTYNIILKGLCRNNCTDEAIVMFQKLHTINVKFNITTLNTMINSMYTVQRREEAKNLFAAISDSGLVPNASTYGIMIRNLLKEGSVEEADSMFLSMERSGCAPCSRLLNDTIRTLLEKGEIVKAGNYMSKVDGKSISLEASTCSLLLSLFSGKGKYREQIQLLPVKYQFFGGVS

SEQ ID NO: 164 - protein, 825 aa, Triticum aestivum
MSRPRLRHCSCFTTPMSRIRFRRRLSSSTSRPTPSWSPRAAFAAATERVRDGTLSPQDAHHLFDELFQQATPVPDRPLNGFLAALTRATPSEACRDGPALALSLFNRVYREEAGMRVAPPTIFTYGVLMNCCCRMRRPELGLAFFGRLLRTGLKEDKIVANTVLKCLCCAKRADDAVKVLLHTMTELGCVPDAFSYAIVLKSLCDDNRSQQALYLLRMMAKEEGVCSPDVVTYNTVIHGFFKEGKIGKACNLFHEMTKQGFVPNVVTYNSVINALCKARAMDNAELFLRQMVDNGVQPNKVTYTSMIHGYSTLGQWKEATKLFREMTSSGLIPDIVTWNSFIDSLCKHGRSKEAAEIFHSMSAKGHKPDIISYTTLLHGYANEGSFPDMMSLFKSMEGDGTVANCQFFNILIDAYAKRGMMDEAMLIFTEMPGQGVNPNVVTYSTVIASLCRMGRLADAMNKFSEMIGTGVQPNTVVYHSLVQGLCTHGDLVKAKELISEMMNKGIPRPNIAFFSSIVHSLCKEGRVMDAHHIFDLVKDIGERSDIIMFNTLIDGYCLVGEMGKAVSVLDVMISAGIEPDIFTYNTLVNGYFKSGRIDDGLNLFREMSHKKIKPTTVTYNIILDGLFRAGRTVAAKKMLHELIGCGTTVSLSTYNIILKGLCRNNCTDEAIVMFQKLHTINVKFNITTLNTMINSMYTVQRREEAKDLFAAISDSGLVPNASTYGIMIRNLLKEGSVEEADSMFLSMERSGCAPCSRLLNDTIRTLLEKGEIVKAGNYMSKVDGKSISLEASTCSLLLSLFSGKGKYREQIQLLPVKYQFFGGVS

SEQ ID NO: 165 - protein, 825 aa, Triticum aestivum; identical to SEQ ID NO: 164

SEQ ID NO: 166 - protein, 825 aa, Triticum aestivum; identical to SEQ ID NO: 164

SEQ ID NO: 167 - protein, 825 aa, Triticum aestivum; identical to SEQ ID NO: 164

SEQ ID NO: 168 - protein, 825 aa, Triticum aestivum; identical to SEQ ID NO: 164

SEQ ID NO: 169 - protein, 825 aa, Triticum aestivum; identical to SEQ ID NO: 164

SEQ ID NO: 170 - protein, 697 aa, Triticum aestivum
MNCCRRTRRPELGLAFFGRVLRMGLRTNVVVATTVLQCLCGAKRTDEAVDILLHRMSELGCVPDAFSYSIVLKSLCDDGRSQRALDLLHMWEKERGLCSPNVVMYNTVIHGFFKEGEVSKACILFHEMEQKGVVPNVVTYSLTIDALCKARAMDKAQLFLRQMIDKGVRPNNVTYNVMIHGYCTLGQWKEARKMFREMTRQGLIPDIVTWTSFMASLCKHGRTKEAAEFFDSMTAKGHKPDLVMYHVLLHGYATKGCFADMINLFNSMATKGIVPDRQVFNILIDAHAKHGMMDEAMHIFTGMQGQGVCPDVWTYSTLISALCRMGRLADAMDNFSQMIGKGVQPNTVVYHSLIQGFSTHGDLRKAKELVYEMTNKGIPCPNIAFFSSVMDSICKEGRVMDAHDIFHLVTDIGLKPNIITFNTLIDGHCLAGEMEKAFGVLDSMVSAGIEADVFTYNTLAYGYCRCGRIDDGLILFREMLQNKPKPTTITYNIILDGLFRAGRTFAAKKMFVEMIETGITVSISTYSIILGGLCRNNCSDEAITLFQKLGTMNVKFDIKILNTMINAMFKVRRREETNGLFAAISASGMVPNASTYSVMIGNLLKEGSVEEAENMFSLMEKSGCAPDSRLINNIIRILLENGDIVKAGNYMSKVDGKSISLEASTTSLLMCLFSSKGKYREQISLLPVNYQFFNGVG

SEQ ID NO: 171 - protein, 824 aa, Triticum aestivum
MSRLRHSTSTAPMPHLRLLRCRSSSISTLPPSRSWSPVTAFAAATERVSAGTLSPEDAHRLFDELLRQATPVPARSLNGFLTALSRAPGTGACGDGPALALALFNRTRREEAGSRVVPSTIFTYGILMNCCRRTRRPELGLAFFGRVLRMGLRTNVVVATTVLQCLCGAKRTDEAVDILLHRMSELGCVPDAFSYSIVLKSLCDDGRSQRALDLLHMWEKERGLCSPNVVMYNTVIHDFFKEGEVSKACSLFHEMEQKGVVPNVVTYSLTIDALCKARAMDKAQLFLRQMIDKGVRPNNVTYNVMIHGYCTLGQWKEARKMFREMTRQGLIPDIVTWTSFMASLCKHGRTKEAAEFFDSMTAKGHKPDLVMYHVLLHGYATKGCFADMINLFNSMATKGIVPDRQVFNILIDAHAKHGMMDEAMHIFTGMQGQGVCPDVWTYSTLISALCRMGRLADAMDNFSQMIGKGVQPNTVVYHSLIQGFSTHGDLRKAKELVYEMTNKGIPCPNIAFFSSVMDGICKEGRVMDAHDIFHLVTDIGLKPNIITFNTLIDGHCLVGEMEKAFGVLDSMVSAGIEADVFTYNTLAYGYCRCGRIDDGLILFREMLQNKPKPTTITYNIILDGLFRAGRTFAAKKMFVEMIETGITVSISTYSIILGGLCRNNCSDEAITLFQKLGAMNVKFDIKILNTMINAMFKVRRREEANGLFAAISASGMVPNTSTYSVMIGNLLKEGSVEEAENMFSLMEKSGCAPDSRLINNIIRILLENGDIVKAGNYMSKVDGKSISLEASTTSLLMCLFSSKGKYREQISLLPVNYQFFNGVG

SEQ ID NO: 172 - protein, 824 aa, Triticum aestivum; identical to SEQ ID NO: 171

SEQ ID NO: 173 - protein, 824 aa, Triticum aestivum; identical to SEQ ID NO: 171

SEQ ID NO: 174 - protein, 836 aa, Triticum aestivum
MSRLRHSTSTAPMSRLRHSTSTAPMPHLRLLRCRSSSISTLPPSRSWSPVTAFAAATERVSAGTLSPEDAHRLFDELLRQATPVPARSLNGFLTALSRAPGTGACGDGPALALALFNRTRREEAGSRVVPSTIFTYGILMNCCRRTRRPELGLAFFGRVLRMGLRTNVVVATTVLQCLCGAKRTDEAVDILLHRMSELGCVPDAFSYSIVLKSLCDDGRSQRALDLLHMWEKERGLCSPNVVMYNTVIHDFFKEGEVSKACSLFHEMEQKGVVPNVVTYSLTIDALCKARAMDKAQLFLRQMIDKGVRPNNVTYNVMIHGYCTLGQWKEARKMFREMTRQGLIPDIVTWTSFMASLCKHGRTKEAAEFFDSMTAKGHKPDLVMYHVLLHGYATKGCFADMINLFNSMATKGIVPDRQVFNILIDAHAKHGMMDEAMHIFTGMQGQGVCPDVWTYSTLISALCRMGRLADAMDNFSQMIGKGVQPNTVVYHSLIQGFSTHGDLRKAKELVYEMTNKGIPCPNIAFFSSVMDGICKEGRVMDAHDIFHLVTDIGLKPNIITFNTLIDGHCLVGEMEKAFGVLDSMVSAGIEADVFTYNTLAYGYCRCGRIDDGLILFREMLQNKPKPTTITYNIILDGLFRAGRTFAAKKMFVEMIETGITVSISTYSIILGGLCRNNCSDEAITLFQKLGAMNVKFDIKILNTMINAMFKVRRREEANGLFAAISASGMVPNTSTYSVMIGNLLKEGSVEEAENMFSLMEKSGCAPDSRLINNIIRILLENGDIVKAGNYMSKVDGKSISLEASTTSLLMCLFSSKGKYREQISLLPVNYQFFNGVG

SEQ ID NO: 175 - protein, 824 aa, Triticum aestivum; identical to SEQ ID NO: 171

SEQ ID NO: 176 - protein, 836 aa, Triticum aestivum
MSRLRHSTSTAPMSRLRHSTSTAPMPHLRLLRCRSSSISTLPPSRSWSPVTAFAAATERVSAGTLSPEDAHRLFDELLRQATPVPARSLNGFLTALSRAPGTGACGDGPALALALFNRTRREEAGSRVVPSTIFTYGILMNCCRRTRRPELGLAFFGRVLRMGLRTNVVVATTVLQCLCGAKRTDEAVDILLHRMSELGCVPDAFSYSIVLKSLCDDGRSQRALDLLHMWEKERGLCSPNVVMYNTVIHDFFKEGEVSKACSLFHEMEQKGVVPNVVTYSLTIDALCKARAMDKAQLFLRQMIDKGVRPNNVTYNVMIHGYCTLGQWKEARKMFREMTRQGLIPDIVTWTSFMASLCKHGRTKEAAEFFDSMTAKGHKPDLVMYHVLLHGYATKGCFADMINLFNSMATKGIVPDRQVFNILIDAHAKHGMMDEAMHIFTGMQGQGVCPDVWTYSTLISALCRMGRLADAMDNFSQMIGKGVQPNTVVYHSLIQGFSTHGDLRKAKELVYEMTNKGIPCPNIAFFSSVMDGICKEGRVMDAHDIFHLVTDIGLKPNIITFNTLIDGHCLVGEMEKAFGVLDSMVSAGIEADVFTYNTLAYGYCRCGRIDDGLILFREMLQNKPKPTTITYNIILDGLFRAGRTFAAKKMFVEMIETGITVSISTYSIILGGLCRNNCSDEAITLFQKLGAMNVKFDIKILNTMINAMFKVRRREEANGLFAAISASGMVPNASTYSVMIGNLLKEGSVEEAENMFSLMEKSGCAPDSRLINNIIRILLENGDIVKAGNYMSKVDGKSISLEASTTSLLMCLFSSKGKYREQISLLPVNYQFFNGVS

SEQ ID NO: 177 - protein, 788 aa, Triticum aestivum
MPGFSSTASMSPLRLRLHARHSSSASQPSRSQGWDPHAAFAAATQRARSGSLTPADAHHLFDELLRQANPVQERPLNNLLAAIARAPASSACRDGPALAVALFSRISQGARRRVAHPTACTYGILMDCCCRARRPDLSLALFGRLLRTGLKADQVVFSTLLKGLCHAKRSDEALHVLLHRMPELGCTPDVVVFNTVIHGFFREGQVGKACDMFLGMAQQGVAPNVVTYNSVIDALCKARAMDKAEYFLRQMVDNGVVPDNVTYNSLIHGYSSSGHQKEVLRVLKEMTSQGIIPDVVTCNSLMAYLCKNGRSKEAAEFFDSMVMKGLKPNIVSYSTLLHGYATEGCLVDMINLFNSMTRDGIQPDCHVLNILINAYAKSGMMDEAILMFKEMQKRGVSPDVVTYSTVIHGFCKMGRLDDAMVKFKQMTDMGVRPNPIVYHSLIKGFCTHGDLVKAKELVTEMRNKAMRPPDIKFFHSIMQNLCTEGRVIEARDILDLMVHIGMRPDVLIFNVLIGGYCLVCKMEDASKIFDDMVSYGLEPCNITYGILINGYCKNRRIDEGLILFKEMLCKGLKPTTFNYNVILDGLFLAGRTVAAKEKFNEMVESGVSVCIDTCSIVLGGLCKNSCSSEAITLFRKLSTMNVKLDIKIVNIIIGAFYRVKRNQEAKDLFAAITANGLVPNAVTYSIMMTNLIKEGSVEEADNLFLSMEKSGSTANSWMLNNIIRRLLERREIVKAGNYMSKVDVKSYSLEAKTVSLLISLFSREGKYRDHIKLLPTKYQFLKEPATVE

SEQ ID NO: 178 - protein, 715 aa, Triticum aestivum
MPGFSSTASMSPLRLRLHARHSSSASQPSRSQGWDPHAAFAAATQRARSGSLTPADAHHLFDELLRQANPVQERPLNNLLAAIARAPASSACRDGPALAVALFSRISQGARRRVAHPTACTYGILMDCCCRARRPDLSLALFGRLLRTGLKADQVVFSTLLKGLCHAKRSDEALHVLLHRMPELGCTPDVVVFNTVIHGFFREGQVGKACDMFLGMAQQGVAPNVVTYNSVIDALCKARAMDKAEYFLRQMVDNGVVPDNVTYNSLIHGYSSSGHQKEVLRVLKEMTSQGIIPDVVTCNSLMAYLCKNGRSKEAAEFFDSMVMKGLKPNIVSYSTLLHGYATEGCLVDMINLFNSMTRDGIQPDCHVLNILINAYAKSGMMDEAILMFKEMQKRGVSPDVVTYSTVIHGFCKMGRLDDAMVKFKQMTDMGVRPNPIVYHSLIKGFCTHGDLVKAKELVTEMRNKAMRPPDIKFFHSIMQNLCTEGRVIEARDILDLMVHIGMRPDVLIFNVLIGGYCLVCKMEDASKIFDDMVSYGLEPCNITYGILINGYCKNRRIDEGLILFKEMLCKGLKPTTFNYNVILDGLFLAGRTVAAKEKFNEMVESGVSVCIDTCSIVLGGLCKNSCSSEAITLFRKLSTMNVKLDIKIVNIIIGAFYRVKRNQEAKDLFAAITANGLVPNAVTYSIMPGLKLSSILKPSIVNRLSFCLSQFVFPR

SEQ ID NO: 179 - protein, 813 aa, Triticum aestivum
MSRVRLHLHRRLLSSTSPPSRSWSPRDAFAAAAERVRAGTLSRDDAHHLFDKLFRQATPVPNRSLNGFLASLARATSTTACIKDGPALALALFNRVCREEAGPQVAAPTVCTYNILMDCCCRARRPDLGLALFGCILRTGLKIEQITANTLLKCLCYAKRTGEAVNVLLHRMSELGCVPDVFAYTTVLKSLCEGSKSLQALDLLRTMAKDRGGCFPDVVAYNTVIHGFFKEGETGKACNLFHEMIHQGVEPDVVTYNLVIDALCKARAMDKAEVVLQQMVDKGVQPDTVTYTYMIHGYSISGRWKETAKLFREMTSRGLIPNIVTCNSFLTSLCKHGRSKEAAEFFDSMTAKGHKPNIVSYRILLHGYATKGCFPDMIDVFNSMESNGIAADCHVFNILIDAYAKRGMMDEAMLIPSKMQERRVNPDIVTYSSIIAGLSRLGRLTEAMEKFNQMIALGVQPDKAVYHTLIQGFCIDGDLAKAKQLVSEMMNRGIPRPNIVFFNSVINSMCKEGRVMDAHDIFELVIDMGERPDNILFNSLIDGYCLVGKMDKALKVLDVMESVGVEPDVITYNTLVNGYCRNGRIVDGLTLFREMPRKRIKPDTISYRIIMDGLFRSGRTVSARQMFHEMIESGTTVSISTYNVILGGLCRNNCADEAIALFQKLGSMNVKFSIAIVNTMINAMYKVQRKEEAKDLFAAISASGLVHNESTYAVMIRNLLKDGAVEDANDMFSSMDKSGIVPSSHLINDIIRMLLERGEIANAGNYLSKVDGKSISLEASTTSLMLSLFSREGKYREDMKLLPAKYQFFDGLC

SEQ ID NO: 180 - protein, 814 aa, Triticum aestivum
MYLIHLHLHRRLFSSTARPSRPSRAWSPHAAFAAATERVRAGNFSWEDAHNLFDESLRRATPVPERSLDGFCAALARGHASEACRDGPALALALFNHVCRDESGARVAPPTIFTYGILMNCCCRAHRPDLGLAFFGRLLRTGLKADLIVANTLLKCLCRAKRTDEAVNVLLHRMSELGCVPDAFSYSIVLKSLCDNGMSQQALDLLHMMAKEGGGCSPDVVAYSTVIHGFFKEGETGKACNLFHEMLQQGVEPNVWTYSSIIDALCKARAMDKAELVLQQMVNKGVQPDNVTYNCMIHGYSTSGRWKEAVKLFREMKSRGLIPDNFTCNSLMTYLCKHGRSKEGAEFFDAMTAKGHRDVISYCVLLHGYANEGCFADMIDLFNSMERNGIAANCYVFNILVNGYAKRGMTDEAMLIFTEMWEKGVSPNVVTYSTVIAALSRMGRLTDSMDKFNQMIAMGIQPNTAVYHSLIQGCLMHGGLVKAKELMFEMMNKGIPCPNIVFFSSVINSLCKEGRVMDAHDVFDLAIGIGERPNVIIFNSLIDGYCLVGKMDKAFKILHVMESVGVESDVVTYSALLDGYFKNRRIDGALTLFREMPRKRIKPDTVTYNIMLDGLFRAGRTVAAMEMFHEMTESGATVRISTYNIILGGLCRNSCVDEAIALFQKLQAMNVKFIIEIFNTMIDAMYKVQRKEEAKDLFAAIPASGLVPNESTYAVMIRNLLKDGAVEDADNMFSSMDNSGIVPSSRLINDIIRMLLEKGEIAKAGNYLSKVDGKSISLEASTTSLMLSLFSRKGKHLEDIKLLPANYQFFDGFG

SEQ ID NO: 181 - protein, 814 aa, Triticum aestivum
MSLIHLHLHRRLFSSTARPSRPSRAWSPHAAFAAATERVRAGNFSWEDAHNLFDELLRRATPVPKRSLDGFLAALARAHASEACRDGPALALALFNLVCRDESGARVAPPTIFTYGILMNCCCRAHCPDLGLAFFGRLLRTGLKADLIVANTLLKCLCHAKRTDEAVNVLLHRMSKLGCVPDTFSYNIVLKSLCDNGMSQQALDLLHMMAKEGGGCPPDVVAYSTVIHGFFKEGETGKACNLFHEMMHQGVEPNVWTYSSIIDALCKARAMDKTELVLQQMVNKGVQPDNVTYNCMIHGYSTSGRWKEAVKLFREMKSRGLIPDISTCNSLMTYLCKHGRSKEGAEFFDAMTAKGHRDVISYCILLHGYANEGCFADMIDLFNSMERNGIAANCYVFNILINGYAKCGMTDEAMLIFTEMWEKGVSPNVVTYSTVIAALSRMGRLTDSMDKFNQMIAMGIQPNTAVYHSLIQGCLMHGGLVKAKELMFDMMNKGIPRPNIVFFSSVINSLCKEGRVMDAHAVFDLAIGIGERPDVITFNSLIDGYCLVGKMDTAFKILDVMELVGVEPDVVTYSALLDGYFKNRRIDDALTFFREMPCKRIKPNTVTYGIMLGGLFRAGRTVAAMKMFHEMIESGATVRISTYNIILGGLCQTNCVDEAIALFQKLRAMNVKFNIETLNTMINAMYKVQRKEEAKDLFAAIPASGLVPNESTYAVMIRNLLKDGAVEDADNMFSSMDNSGIVPSSRLINDIIRMLLEKGEIAKAGNYLSKVDGKSISLEASTTSLMLSLFSRKGKHLEDIKLLPAKYQFFDGFG

SEQ ID NO: 182 - protein, 814 aa, Triticum aestivum
MSLIHLHLHRRLFSSTARPSRPSRAWSPHAAFAAATERVRAGNFSWEDAHNLFDELLRRATPVPKRSLDGFLAALARAHASEACRDGPALALALFNLVCRDESGARVAPPTIFSYGILMNCCCRAHCPDLGLAFFGRLLRTGLKADLIVANTLLKCLCHAKRTDEAVNVLLHRMSKLGCVPDTFSYNIVLKSLCDNGMSQQALDLLHMMAKEGGGCPPDVVAYSTVIHGFFKEGETGKACNLFHEMMHQGVEPNVWTYSSIIDALCKARAMDKTELVLQQMVNKGVQPDNVTYNCMIHGYSTSGRWKEAVKLFREMKSRGLIPDISTCNSLMTYLCKHGRSKEGAEFFDAMTAKGHRDVISYCILLHGYANEGCFADMIDLFNSMERNGIAANCYVFNILINGYAKCGMTDEAMLIFTEMWEKGVSPNVVTYSTVIAALSRMGKLTDSMDKFNQMIAMGIQPNTAVYHSLIQGCLMHGGLVKAKELMFDMMNKGIPRPNIVFFSSVINSLCKEGRVMDAHAVFDLAIGIGERPDVITFNSLIDGYCLVGKMDTAFKILDVMESVGVEPDVVTYSALLDGYFKNRRIDDALTFFREMPCKRIKPNTVTYGIMLGGLFRAGRTVAAMKMFHEMIESGATVRISTYNIILGGLCQTNCVDEAIALFQKLRAMNVKFNIETLNTMINAMYKVQRKEEAKDLFAAIPASGLVPNESTYAVMIRNLLKDGAVEDADNMFSSMDNSGIVPSSRLINDIIRMLLEKGEIAKAGNYLSKVDGKSISLEASTTSLMLSLFSRKGKHLEDIKLLPAKYQFFDGFG

SEQ ID NO: 183 - protein, 814 aa, Triticum aestivum; identical to SEQ ID NO: 181

SEQ ID NO: 184 - protein, 814 aa, Triticum aestivum; identical to SEQ ID NO: 181

SEQ ID NO: 185 - protein, 814 aa, Triticum aestivum; identical to SEQ ID NO: 181

SEQ ID NO: 186 - protein, 814 aa, Triticum aestivum; identical to SEQ ID NO: 182

SEQ ID NO: 187 - protein, 772 aa, Triticum aestivum
MPTTRLSSVSASSFKASSRKPRAPLAALAAATERVRAGTLSQEDAHHLFDKLLGQATAVPERGLNNFLAALARASPSATCSDGPGLAVTLFNRMSLGAGARVASPTLCTYSILMDCCCRAGRPDLVVTFFGRLLRLGLRLNVVSFNNLLKGLCQAKRSNEALDLLLHRMPELDRAPDVFSFNIVINGCFREGEVDKACNLFHEMPQLGVQPDVVTYNSIIIALSRAGAMGKAEVVLRQMVDKGIGPDVMTYSSLIHGYSTSGQWKAAVRVFKEMVSVGVRPNAVTLNSFMDSLCKHRRTKEARDIFDSMAAKGHKPNIVSYSTMLNGYAKQGCFDDMTGLFNSMVQNGIVPNNHVFNILIRAYSTRGLMDEAMHMFEVMKQQGVNPDVVDYLVVIDSLCKMGRMDAAMDKFNQMVNQGVSPDIGIYQCLVLGSCSNGDFVKAKELISEAVNRGLCYNSVFFYPVINNLSKEGNVKDAQDMFDFIVGIGHQPDVIMYNSLMDGYCLVGKVEEALTVLDAMKSADLQPDAITYVILLNGYCKIGRIDDGLSLFREMSLSGVKPTTIMYNIALDGLFRSRRTVSAKEKFHTIIESGIPVDVGTYTIVLSGLCKNNCTDEAIELFNKLRAMNMKINVIILNTMISAMFKTRRIEEAKDLFATIPAIGLVPSVVTYTVMMTNFIKEGLLAEADDMFLAMEKAGCAPDCRLLNHVVRVLLEKGAVVKAATYLAKLDAKELSLEASTVSLIVSLFSRRGKLREHVKLLPVKYQPPEMLG

SEQ ID NO: 188 - protein, 439 aa, Triticum aestivum
MINLFNSMEGNGIVADCNVFNILIDAYAKCGMMHEAMLIFTKMREQGVSPNVCTYATVIAALCRMGRLSDAMGKLNEMIATGLQPDVAIYTSLIQGFCTHGDLGKVKELVSEMMNKGMPRPNIVFFSSVINSLCKEGRVTDVHSIFDLAINIGERPDVITFTSLIDGYCLVGKMDKAFKVLDDMVSAGIEPDVYTYTTLLDGYSRNGRIDDGLTLFSEMMHKKIKPTTATYGTLLNGLFRAWRTASAKKMIHEMIESGTTVSLSIYAIILEGLRRNNCTDEAITLFQKVRAMNIKLDVAILNTMINAMFKVQRREEANDLFASISASGLVPNASTYRTMITNLLKEGLVEEAENMLSSMEKSCCAPDSRLINDTIRILLEQGEVVKAGNYMSRVDGKSISLEASTTSLLIRLFSREGKYREKIKLLPVKYQFFGGATVE

SEQ ID NO: 189 - protein, 439 aa, Triticum aestivum; identical to SEQ ID NO: 188

SEQ ID NO: 190 - protein, 826 aa, Triticum aestivum
MRNKKKSHEEAILPASDLLQQRLLTIPPARTRRPCPSHASPLPHHAHAPPPLLRRRRLSSSSTSSPSRRWDPRAAFAAATERVRAGTLSPEDAHHLFDELLLQANPVPYRSLNGFLAALARAPSSAALRDGPSLALALFNRVCREEAGPRVAPPTVCTYSILMDSCCRACRPNLGLAFFGRFLRTGLKADQIVASNLLKCLCHAKRTDEAVNMLLHRMSEFGCVPNVISYSIVLKSLCDDSRSQQALDLLQMVRKEGGACSFNVVAYSTVIHGFFKEGEVSKACDLFHEMMQQGIVPNVVTYSSIIDALCKVRAMDKAKLVLQQMVDNGVRPNMYTWNSFMYSLCKNGRSKEAAEFFDSMTSKGLKPNIIVYSTLLHGYATEGCLADMINLFNSMEGNGIVADCNVFNILIDAYAKCGMMHEAMLIFTKMREQGVSPNVCTYATVIAALCRMGRLSDAMGKLNKMIATGLQLDVAIYTSLIQGFCTHGDLGKVKELVSEMMNKGMPRPNIVFFSSVINSLCKQGRVTDAHSIFDLAINIGERPHVITFTSLIDGYCLVCKMDKAFKVLDAMVSAGIEPDVYTYTTLLDGYSRNGRIDDGLTLFSEMMHNKTKPTTATHGTLLNGLFRAGRTASAKKMIHEMIESGTTVSLSIYAIILEGLCRNNCADEAITLFQKVRAMNIKLDVAILNTMINAMFKVQRREEANDLFASISASGLVPNASTYRTMITNLLKEGLVEEAENMLSSMEKSCCAPDSRLINDIIRILLEQGEVVKAGNYMSRVDGKSISLEASTTSLLIRLFSREGKYREKIKLLPVKYQFFGGATVE

SEQ ID NO: 191 - protein, 439 aa, Triticum aestivum; identical to SEQ ID NO: 188

SEQ ID NO: 192 - protein, 439 aa, Triticum aestivum
MINLFNSMEGNGIVADCNVFNILIDAYAKCGMMHEAMLIFTKMREQGVSLNVCTYATVIAALCRMGRLSDAMGKLNEMIATGLQPDVAIYTSLIQGFCTHGDLGKVKELVSEMMNKGMPRPNIVFFSSVINSLCKEGRVTDAHSIFDLAINIGERPDVITFTSLIDGYCLVGKMDKAFKVLDAMVSAGIEPDVYTYTTLLDGYSRNGRIDDGLTLFSEMMHKKIKPTTATYGTLLNGLFRAGRTASAKKMIHEMIESGTTVSLSIYAIILEGLRRNNCTDEAITLFQKVRAMNIKLDVAILNTMINAMFKVQRREEANDLFASISASGLVPNASTYRTMITNLLKEGLVEEAENMLSSMEKSCCAPDSRLINDIIRILLEQGEVVKAGNYMSRVDGKSISLEASTTSLLIRLFSREGKYREKIKLLPVKYQFFGGATVE

SEQ ID NO: 193 - protein, 826 aa, Triticum aestivum; identical to SEQ ID NO: 190

SEQ ID NO: 194 - protein, 664 aa, Triticum aestivum
MDSCCRACRPNLGLAFFGRFLRTGLKADQIVASNLLKCLCHAKRTDEAVNMLLHRMSEFGCVPNVISYSIVLKSLCDDSRSQQALDLLQMVRKEGGACSFNVVAYSTVIHGFFKEGEVSKACDLFHEMMQQGIVPNVVTYSSIIDALCKVRAMDKAKLVLQQMVDNGVRPNMYTWNSFMYSLCKNGRSKEAAEFFDSMTSKGLKPNIIVYSTLLHGYATEGCLADMINLFNSMEGNGIVADCNVFNILIDAYAKCGMMHEAMLIFTKMREQGVSPNVCTYATVIAALCRMGRLSDAMGKLNKMIATGLQPDVAIYTSLIQGFCTHGDLGKVKELVSEMMNKGMPRPNIVFFSSVINSLCKEGRVTDAHSIFDLAINIGERPDVITFTSLIDGYCLVGKMDKAFKVLDAMVSAGIEPDVYTYTTLLDGYSRNGRIDDGLTLFSEMMHNKIKPTTATHGTLLNGLFRAGRTASAKKMIHEMIESGTTVSLSIYAIILEGLCRNNCADEAITLFQKVRAMNIKLDVAILNTMINAMFKVQRREEANDLFASISASGLVPNASTYRTMITNLLKEGLVEEAENMLSSMEKSCCAPDSRLINDIIRILLEQGEVVKAGNYMSRVDGKSISLEASTTSLLIRLFSREGKYREKIKLLPVKYPFFGGATVE

SEQ ID NO: 195 - protein, 439 aa, Triticum aestivum; identical to SEQ ID NO: 188

SEQ ID NO: 196 - protein, 439 aa, Triticum aestivum; identical to SEQ ID NO: 188

SEQ ID NO: 197 - protein, 664 aa, Triticum aestivum; identical to SEQ ID NO: 194

SEQ ID NO: 198 - protein, 439 aa, Triticum aestivum; identical to SEQ ID NO: 188

SEQ ID NO: 199 - protein, 664 aa, Triticum aestivum; identical to SEQ ID NO: 194

SEQ ID NO: 200 - protein, 664 aa, Triticum aestivum; identical to SEQ ID NO: 194

SEQ ID NO: 201 - protein, 820 aa, Triticum aestivum
MSRLRHSTSTAPMFHLRLLRCRFSSISTLPPSRSWSPHAAFAAATERVIAGTLSPEDAHRLFDELLRQATPVPARSLNGFLTALSRAPDTGACRDGPALFNRTRREEAGSRVVSSTIFTYGILMNCCGRTRRPELGLAFFGRVLRMGLKTNVVVATMVLQCLSSAKRTDEAVDILLHRISELGCVPDAFSYSIVLKSLCDDSRSQRALDLLHMWEKERGVCSPNVVTYNTGIHGFFKEGEVSKACNLFHEMVQKGVEPNVVTYSLTIDALCKARAMDKAELFLRQMIDKGVQPNNVTYNVMIHGYSTLGQWKEAGKMFREMTRQGLIPDLVTWTSFMASLCKHGRTKEAAEFFDSMTAKGHKPDLVTYHVLLHGHATEGCFADMINLFNAMATKGILPDRQVFNILIDAHAKHRMMDEAMHIFTGMQGQGVCPDVWTYSTLISALCRMGRLADAMDNFSQMIGKGVQLNTVVYHSLIQGFSTHGDLRKAKELVYEMTNKGIPCPNIAFFSSIMDSLCKEGRVMDAHDIFHLVTDIGLKPNIITFNTLIDGYCLVGEMEKAFGVLDSMVSAGIEADVFTYNTLAYGYCRCGRTDDGLILFREMVQNKPKPTTITYNIILDGLFRAGRTFAAKKMFLEMTETGITVSISTYSIILGGLCRNNCSDEAITLFQKLGAMDVKFDIKILNTMINAMFKVRRREEANGLFAGISASRMVPNASTYSVMIGNLLKEGSVEEAENMFSLMEKSGCAPDSRLINNIIRILLENGDIVKAGNYMSKVDGKSISLEASTTSLLMCLFSSKGKYREQISLLPVNYQFFNGVS

SEQ ID NO: 202 - protein, 820 aa, Triticum aestivum; identical to SEQ ID NO: 201

SEQ ID NO: 203 - protein, 824 aa, Triticum aestivum
MSRLRHSTSTVPMFHLRLLRCRFSSISTLPPSRSWSPHAAFAAATERVIAGTLSPEDAHRLFDELLRQATPVPARSLNGFLTALSRAPDTGACRDGPALALALFNRTRREEAGSRVVSSTIFTYGILMNCCRRTRRPELGLAFFGRVLRMGLKTNVVVATMVLQCLCSAKRTDEAVDILLHRMSELGCVPDAFSYSIVLKSLCDDSRSQRALDLLHMWEKERGVCSPNVVTYNTVIHGFFKEGEVSKACNLFHEIVQKGVEPNVVTYSLTIDALCKARAMDKAELFLRQMIDKGVQPNKVTYNVMIHGYSTLGQWKEAGKMFREMTRQGLIPDLVTWTSFMASLCKHGRTKEAADFFDSMTAKGHKPDLVTYHVLLHGHATEGCFADMINLFNAMATKGILPDRQVFNILIDAHAKHGMMDEAMHIFTGMQGQGVCPDVWTYSTLISALCRMGRLADAMDNFSQMIGKGVQPNTVVYHSLIQGFSTHGDLRKAKELVYEMTNKGIPCPNIAFFSSIMDSLCKEGRVMDAHDIFHLVTDIGLKPNIITFNTLIDGYCLVGEMEKAFGVLDSMVSAGIEADVFTYNTLAYGYCRCGRIDDGLILFREMVQNKPKPTTITYNIILDGLFRAGRTFAAKKMFLEMTETGITVSISTYSIILGGLCRNNCSDEAITLFQKLGAMDVKFDIKILNTMINAMFKVRRREEANGLFAGISASRMVPNASTYSVMIGNLLKEGSVEEAENMFSLMEKSGCAPDSRLINNIIRILLENGDIVKAGNYMSKVDGKSISLEASTTSLLMCLFSSKGKYREQISLLPVNYQFFNGVS

SEQ ID NO: 204 - protein, 820 aa, Triticum aestivum; identical to SEQ ID NO: 201

SEQ ID NO: 205 - protein, 820 aa, Triticum aestivum; identical to SEQ ID NO: 201

SEQ ID NO: 206 - protein, 820 aa, Triticum aestivum
MSRLRHSTSTAPMFHLRLLRCRFSSISTLPPSRSWSPHAAFAAATERVIAGTLSPEDAHRLFDELLRQATPVPARSLNGFLTALSRAPDTGACRDGPALFNRTRREEAGSRVVSSTIFTYGILMNCCGRTRRPELGLAFFGRVLRMGLKTNVVVATMVLQCLSSAKRTDEAVDILLHRMSELGCVPDAFSYSIVLKSLCDDSRSQRALDLLHMWEKERGVCSPNVVTYNTVIHGFFKEGEVSKACNLFHEMVQKGVEPNVVTYSLTIDALCKARTMDKAELFLRQMIDKGVQPNNVTYNVMIHGYSTLGQWKEAGKMFTEMTRQGLIPDLVTWTSFMASLCKHGRTKEAAEFFDSMTAKGHKPDLVTYHVLLHGHATEGCFADMINLFNAMATKGILPDRQVFNILIDAHAKHGMMDEAMHIFTGMQGQGVCPDVWTYSTLISALCRMGRLADAMDNFSQMIGKGVQPNTVVYHSLIQGFSTHGDLRKAKELVYEMTNKGIPCPNIAFFSSIMDSLCKEGRVMDAHDIFHLVTDIGLKPNIITFNTLIDGYCLVGEMEKAFGVLDSMVSAGIEADVFTYNTLAYGYCRCGRIDDGLILFREMVQNKPKPTTITYNIILDGLFRAGRTFAAKKMFLEMTETGITVSISTYSIILGGLCRNNCSDEAITLFQKLGAMDVKFDIKILNTMINAMFKVRRREEANGLFAGISASRMVPNASTYSVMIGNLLKEGSVEEAENMFSLMEKSGCAPDSRLINNIIRILLENGDIVKAGNYMSKVDGKSISLEASTTSLLMCLFSSKGKYREQISLLPVNYQFFNGVS

SEQ ID NO: 207 - protein, 825 aa, Triticum aestivum
MPRSRLRRYASTMPMSSLRPLHRSSSSTTSPARAWSPHAAFAAATERVRAGTVRPEDAHTLFDELLRQATPVPQRSLNGFLAALARAPASGACIRDGPALAVALFNRVCRDEAGPQVAALTGCTYSILMDCCCRARRPDLGLALFGRFLREGLKTDQIVANTFLKCLCYAKRTDEAVDVLLHRMSELGCVPDAFSYNTVLKSLCDNGMSQRALDLLQRMAKEGGVCSLNLVAYNTVIHGFFKEGETGKACSLFHEMMQQGVVPNVWTYTSIIDALCKARAMDKAELVLRQMVAKGAQPDIVTYTCMINGYATSGRLKEAAKMFREMKSRGLTPNIVTCGSLMTYLCKHGRSKEAREIFDSMTAKGHRANVVSYCILLHGYANEGCFADMIDLFNSMKSNGIAADCRVFNILINGYAKRGKMDEAMLIFTEMWEKGVSPDVVTYSTVIAALSRMGRLTDAMDKFNQMISMGVQPNTAVYHSLIQGSCMHGDLIKAKELVSEMMNKGIPRPSIAFFGSIINRLCKDGRVMDAHDIFDLVIDIGERPSVITFNSLIDGYCLVGKMDKAFKILDAMEVVGVESDVITYSTLLDGYFKNGRINDGLTLFREMPHKGIKPDTVTYGIMLDGLFRAGRTVAVRTVFHEMIESGITVDIPTYNIVLGGLCRNNCTDEAIALFQKLGAMSVKSNIAILNTMIDGMYKVRRREEANDLFATISASGLVPNESTYAVMIINLLKDGAVEEADNMFSSMEKTGIVPSSRLLNHIIRMLLEIGEIAKAGNYLSKVDGKSISLEASTTSLMLSFFSKKGKYREDMKLLPAKFQIFDGFG

SEQ ID NO: 208 - protein, 825 aa, Triticum aestivum
MPRSRLRRYASTMPMSSLRPLHRSSSSTTSPARAWSPHAAFAAATERVRAGTVRPEDAHTLFDELLRQATPVPQRSLNGFLAALARAPASGACIRDGPALAVALFNRVCRDEAGPQVAALTGCTYSILMDCCCRARRPDLGLALFGRFLREDLKTDQIVANTFLKCLCYAKRTDEAVDVLLHRMSELGCVPDAFSYNTVLKSLCDNGMSQRALDLLQRMAKEGGVCSLNLVAYNTVIHGFFKEGETGKACSLFHEMMQQGVVPNVWTYTSIIDALCKARAMDKAELVLRQMVAKGAQPDIVTYTCMINGYATSGRLKEAAKMFREMKSRGLTPNIVTCGSLMTYLCKHGRSKEAREIFDSMTAKGHRANVVSYCILLHGYANEGCFADMIDLFNSMKSNGIAADCRVFNILINGYAKRGKMDEAMLIFTEMWEKGVSPDVVTYSTVIAALSRMGRLTDAMDKFNQMISMGVQPNTAVYHSLIQGSCMHGDLIKAKELVSEMMNKGIPRPSIAFFGSIINRLCKDGRVMDAHDIFDLVIDIGERPSVITFNSLIDGYCLVGKMDKAFKILDAMEVVGVESDVITYSTLLDGYFKNGRINDGLTLFREMPHKGIKPDTVTYGIMLDGLFRAGRTVAVRTVFHEMIESGITVDIPTYNIVLGGLCRNNCTDEAIALFQKLGAMSVKSNIAILNTMIDGMYKVRRREEANDLFATISASGLVPNESTYAVMIINLLKDGAVEEADNMFSSMEKTGIVPSSRLLNHIIRMLLEIGEIAKAGNYLSKVDGKSISLEASTTSLMLSFFSKKGKYREDMKLLPAKFQIFDGFG

SEQ ID NO: 209 - protein, 825 aa, Triticum aestivum; identical to SEQ ID NO: 208

SEQ ID NO: 210 - protein, 825 aa, Triticum aestivum; identical to SEQ ID NO: 208

SEQ ID NO: 211 - protein, 825 aa, Triticum aestivum; identical to SEQ ID NO: 207

SEQ ID NO: 212 - protein, 825 aa, Triticum aestivum; identical to SEQ ID NO: 208

SEQ ID NO: 213 - protein, 825 aa, Triticum aestivum
MPRSRLRRYASTMPMSSLRPLHRSSSSTTSPARAWSPHAAFAAATERVRAGTLRPEDAHTLFDELLRQATPVPDRSLNGFLAALAHAPASGNCIRDGPALAVALFNRVCREEAGPRVAVLTGCTYSILMDCCCRARRPDLGLALFGRFLREGLKTDQIVANTFLKCLCYAKRTDEAVDVLLHRMSELGCVPDAISYNTVLKSLCDNGMSQRGLELLQMIAKEGGVCSLNLVAYNTVIYGFFKEGETGKARNLFHEMMQQGVEPDVVTYNLIIDALCKARAMDKAEVVLQQMISKGAQPDTVTYNCMINGYATSGRLKESAKLFREMKSRGLTPNNVTCNSFLSSLCKHGRSKEAREIFDSMTAKGRRANVVSYSILLHGYANEGCFADMIDLFNSMKSNGIAADCRVFTILIDAYAKRGMMDDAMHIFTEMQQQGVSPNVVTYSTVISALSRMGRLTDSMEKFNQMVALGVQPDRAIYRSLIQGFCMHGGLVKAKELVSQMINKGIPRPSIEFFNSVINSMCKEGRVMDAHDIFDLVIDIGERPDDITFNSLIDGYCLVGKMDKAFKILDAMEVVGVEPDVITYNTLLDGYFKNGRINDGLALFREMPHKRIKPDIVTYGIMLDGLFRAGRTVSARTMFHEMIESGITVNIFTYNIVLGGLCRNNCTDEAIALFQKLGAMSVKFNIATLNTMIDGMYKVRRREEANDLFATISASGLVPNESTYAVMIINLLKDGAVEEANNMFSSMEKTGIVPSSRLLNRIIRMLLEIGEIAKAGNYLSKVDGKSISLEASTTSLMLSFFSKKGKYREDMKLLPAKFQFFDGFG

SEQ ID NO: 214 - protein, 814 aa, Triticum aestivum
MSRIRLRRRRRHRLPSSTSRPSPSWSPHAACAAATERVRAGTLSPQDAHHLFDELLRQATPVPERSLNGFLAALSRATPSKACRDGPALVLSLFNRVCREEAGGMRVAPPTIFTYGVLMNCCCRTRRPELGLAFFGRLLRTGLKADKTIANTVLKCLCCAKRTDDAVKVLRRRMSELGCVPDAFSYAIVLKGLCDDNRSQQALDLLRMMAKEGVCSPDVVTYNTVIHGFFKEGKIGKACNLFHEMTKQGFVPNVVTYNSVISALCKARAMDNAELFLREMVDNGVQPNKVTYTSMIHGYSTLGQWKEATKLFREMTSSGLIPDIVTWNSFIDSLCKHGRSKEAAENFHSMSAKGHKPDIISYATLLHGYANEGSFPDMMSFFKSMEGDGIVANCQVFNILIDAYAKRGMMDEAMLIFTEMPGQGVNPNVVTYSTVIASLCRMGRLADAMNKFSEMIGTGVQPNTVVYHSLVQGLCTHGDLVKAKELISEMMNKGIPRPNIAFFSSIVHSLCKEGRVMDAHHIFDLVKDIGERSDIIMFNTLIDGYCLIGEMGKAVSVLDVMISAGIEPDIFTYNTLVNGYFKSGRIDDGLNLFREMSHKKIKPSTVTYNIILDGLFRAGRTVAAKKMLHEMIGCGTTVSLSTYNIILRGLCRNNCTDEAIAMFQKLRTINVKFNITTLNTMINSMYTVQRREEAKDLFAAISDSGLVPNVSTYGIMIRNLLKEGSVKEADNMFLSMEKSGCAPCSRLLNDTIRTLLEKGEIVKAGNYMSKVDGKSISLEASTSSLLLSLFSGKGKYREQIQLLPVKYQFFGGVS

SEQ ID NO: 215 - protein, 814 aa, Triticum aestivum; identical to SEQ ID NO: 214

SEQ ID NO: 216 - protein, 814 aa, Triticum aestivum
MSRIRLRRRRRHRLPSSTSRPSPTLSPHAACAAATERVRAGTLSPQDAHHLFDELLRQATPVPERSLNGFLAALSRATPSKACRDGPALVLSLFNRVCREEAGGMRVAPPTIFTYGVLMNCCCRTRRPELGLAFFGRLLRTGLKADKTIANTVLKCLCCAKRTDDAVKVLRRRMSELGCVPDAFSYAIVLKGLCDDNRSQQALDLLRMMAKEGVCSPDVVTYNTVIHGFFKEGKIGKACNLFHEMTKQGFVPNVVTYNSVINALCKARAMDNAELFLQQMVDDGVQPNKVTYTSMIHGYSTLGQWKEATKLFREMTSSGLIPDIVTWNSFIDSLCKHGRSKEAAEIFHSMSAKGHKPDIISYATLLHGYANEGSFPDMMSLFKSMEGDGIVANCQVFNILIDAYAKRGMMDEAMLIFTEMPGQGVNPNVVTYSTVIASLCRMGRLADAMNKFSEMIGTGVQPNTVVYHSLVQGLCTHGDLVKAKELISEMMNKGIPRPNIAFFSSIVHSLCKEGRVMDAHHIFDLVKDIGERSDIIMFNTLIDGYCLIGEMGKALRVLDAMISAGIEPDIFTYNTLVNGYFKSGRINDGLSLFREMSHKEIKPTTVTYNIILDGLFRAGRTVAAKKMLHEMTGCGTTVSLSTYNIILRGLCRNNCTDEAIAMFQKLHTMNVKFNITTLNTMINSMYTVQRREEAKDLFAAISDSGLVPNASTYDIMIRNLLKEGSVEEADNMFLSMEKSGCAPCSRLLNDTIRTLLEKGEIVKAGNYMSKVDGKSISLEASTSSLLLSLFSGKGKYREQIQLLPVKYQFFGGVS

SEQ ID NO: 217 - protein, 814 aa, Triticum aestivum
MSRIRLRRRRRHRLPSSTSRPSPSWSPHAACAAATERVRAGTLSPQDAHHLFDELLRQATPVPERSLNGFLAALSRATPSKACRDGPALVLSLFNRVCREEAGGMRVAPPTIFTYGVLMNCCCRTRRPELGLAFFGRLLRTGLKADKTIANTVLKCLCCAKRTDDAVKVLRRRMSELGCVPDAFSYAIVLKGLCDDNRSQQALDLLRMMAKEGVCSPDVVTYNTVIHGFFKEGKIGKACNLFHEMTKQGFVPNVVTYNSVISALCKARAMDNAELFLREMVDNGVQPNKVTYTSMIHGYSTLGQWKEATKLFREMTSSGLIPDIVTWNSFIDSLCKHGRSKEAAENFHSMSAKGHKPDIISYATLLHGYANEGSFPDMISFFKSMEGDGIVANCQVFNILIDAYAKRGMMDEAMLIFTEMPGQGVNPNVVTYSTVIASLCRMGRLADAMNKFSEMIGTGVQPNTVVYHSLVQGLCTHGDLVKAKELISEMMNKGIPRPNIAFFSSIVHSLCKEGRVMDAHHIFDLVKDIGERSDIIMFNTLIDGYCLIGEMGKAVSVLDVMISAGIEPDIFTYNTLVNGYFKSGRIDDGLNLFREMSHKKIKPSTVTYNIILDGLFRAGRTVAAKKMLHEMIGCGTTVSLSTYNIILRGLCRNNCTDEAIAMFQKLRTINVKFNITTLNTMINSMYTVQRREEAKDLFAAISDSGLVPNVSTYGIMIRNLLKEGSVKEADNMFLSMEKSGCAPCSRLLNDTIRTLLEKGEIVKAGNYMSKVDGKSISLEASTSSLLLSLFSGKGKYREQIQLLPVKYQFFGGVS

SEQ ID NO: 218 - protein, 814 aa, Triticum aestivum; identical to SEQ ID NO: 214

SEQ ID NO: 219 - protein, 814 aa, Triticum aestivum; identical to SEQ ID NO: 214

SEQ ID NO: 220 - protein, 814 aa, Triticum aestivum; identical to SEQ ID NO: 214

SEQ ID NO: 221 - protein, 812 aa, Triticum aestivum
MSNLRLLRRSSSSTSTPTSWSSRSWSPHAAFAAATERVRAGTLNQDDAHHLFDELLRQANPVPGRSLNGFLAALARATSSAACIRDGPTLAIALFNRLCREQAGLRVAPLTIHTYGILMDCCCRASRPELGLALFGRFLRTGLKTNEIVASTFLKCLCYAKRTDEAVNVLLHRMSELGCVPNAISYSIVLKSLCDNSMSLRALDLLQMMAKEGGACSPNVVAYSTVIHGFFKESETGKACNLFHEMMQQGVEPSVWTYSSIIDALCKARAMDKAELVLQQMVNKGVQPNNVTYNCMIHGYSTSGQWKEAAKLLREMKSRGLIPDIVTCNSFLASLCKHGRSKEAAEFLDSMTAKGHKPDIVSYRILLHGYGTEGCFADMIDVFYSMESNGIAADCHVFNILINGYAKRGMTEEAMLIFTEMQGQGVSPDVVTYSIVIAALSRMGRLTDAIEKFNEMTALEVQPDTTVYHSLIQGCCIDGYLVKAKELMFEMMNGGIPRPNIVFFSSVINSLCKEGRVMDAHDVLDLVIGIGERPNVITFNSLIDGYCLVGNMDKAFKILDVMESVGVEPNVVTYSALLDGYSKNRRIDDALTLFREMPRKRIKPDTVTYGIMLDGLFRAGRTVAAMEMFHEMTESGTTVDIFIYNIILGGLCRNNCVDEAIALFQKLRAMNVKFNIEILNTMINAMYKVQRKEEAKELFATISANGLVPNESTYAVMIRNLLKGGAVEDADNMFSSMDNSGIVPSSRLINDIIRMLLKKGEIAKAGNYLSKVDGKSISLEASTTSLLLSRKGKHQVDIKLLPAKYQFFDGFG

SEQ ID NO: 222 - protein, 812 aa, Triticum aestivum; identical to SEQ ID NO: 221

SEQ ID NO: 223 - protein, 812 aa, Triticum aestivum; identical to SEQ ID NO: 221

SEQ ID NO: 224 - protein, 774 aa, Triticum aestivum
MPTARLSSVSASSFKASSRKPRAPLAALAAATERVRAGTLSQEDAHHLFDELLGQATAVPERGLNNFLAALARASPSATCSDGPGLAVTLFNRMSLGAGARVASPTLCTYSILMDCCCRAGRPDLVVAFFGRLLRLGLRLNVISFNNLLKGLCQAKRSNEALDLLLHRMPELDCAPDVFSFNIVINGCFREGEVDKACNLFHEMPQLGVQPDVVTYNSIIIALSRAGAMGKAEVVLRQMVDKGIGPDVMTYNSLIHGYSTLGQWKAAVRVFKEMVSVGVLPNAVTLNSFMDSLCKHRRTKEARDIFDSMAAKGHKPNIASYSTMLNGYAKQGCFDDMTGLFNSMVQNGIVPNNHVFNILIRAYSTRGLMDEAMHMFEVMKQQGVNPDVVDYLVVIDSLCKMGRMDAAMDKFNQMVNQGVSPDIVVYQCLVLGSCSNGDFVKAKELISEAVNRGLCSNSVFFYPVINNLSKEGNVKDAQDMFDFIVGIGHQPDVIMYNSLMDGYCLVGKVEEAMTVLDAMKSAGLQPDAITYAILLNGYCKIGRIDDGLSLFREISLSRVKPTTIMYNIILDGLFCCGRTVFAKEEFDTMIESGIPVGIDTCTIVLSGLCKNNCTDEAIELFKKLCAMNVKFDVIILTTMISAMFKTRRVEEAKDLFATISTIGLVPSVVTYSVMMTNFIKEGSLAEADDMFLAMEKAGCAPDSRLLNHVVRVLLEKGAVVKAATYLGKLDGKQLSLEASTVSLIVSLFSRKGKLREHVKLLPVKYQPPESSTDN

SEQ ID NO: 225 - protein, 774 aa, Triticum aestivum; identical to SEQ ID NO: 224

SEQ ID NO: 226 - protein, 774 aa, Triticum aestivum; identical to SEQ ID NO: 224

SEQ ID NO: 227 - protein, 823 aa, Triticum aestivum
MSRLRSASTAPMPRLRLLSCRSYSISTLPPSRSWSPHAAFAAATERVSAGTLTPEDAHHLFDELLRQSTPVPARSLNGFLTALARARDTDACRDGPALALALFNRTRREEAGSRVVSPTIFTYGILMNCCCHTLRPDLGLAFFGRVLRMGLKTNVVVATTVLKCLCGAKRTDEAVNILLHRMSELGCVPDDFSYSIVLKSLCDDGRSQRALDLLQMWEKERGVCSPNVVAYNIVIHGFFKEGEVSKACDLFHAMVQRGVVPNVMTYTLTIDALCKARAMDKAKLFLRQMIDKGVRPNNVTYNVMIHGYSTLGQWKEAGKVFREMSRQGLIPDIVTWTSFMASLCKHGRTKEAANFFDSMTAKGHKPDLVTYHVLLHGYGTEGCFADMINLVNSMATKGIVPDRQVFNILIDAHAKHGMMDEAMHIFTGMQGQGVCPDVWTYSTIISALCRMGRLADGMDNFSQMIGKGVEPNTVVYHSLIQGFSTHGDLRKAKELVYEMRNKGIPCPNIAFFTSIMDSLCKEGRVMDAHDIFNLVTDIGEKPNVITFNTLIDGHCLVGEMEKAFGVLDSMVSAGIEADVFTYNTLAYGYCRCGRIDDGLILFREMLRKKPKPTTITYNIILDGLFRAGRTVAAKKMFHEMIEGGITVSMSTYSIILGGLCRNNCAEEAITLFQKLGAMNVKLDIRILNTMINAMFKVRRREEANSLFAAISASGMAPNASTYGLMIGNLLKEGSVQEAENMFSLMEKSGCAPGSRLINNIIRILLEKGDIVKAGNYMSKVDGKTISLEASTTSLLMCLFSSKGRYREQINLLPGNYQFFNGVS

SEQ ID NO: 228 - protein, 772 aa, Triticum aestivum
MPTARLSSVFASSFKSSLRKPRAPVAALAAATERVRARTLSQQDAHHLFDELLSQAAAVPERGLNNFLAALARAPPSSACSDGPGLAIALFNRMSQGAGARVVSPTLCTYSILMDCCCRAGRPDLVVAFFGRLIRLGLRLDVIAFSNLLKGLCKAKRSNEALDLLLHRMPELDCAPDVFSYSIVINGCFKEGEVDKACNLFHEMIQLGVQPDVAIYTSIIDALSKCGAMDKAEVVLRQMVDQGIGPDVMTYSSLIHGYSTLGQWKAAVRVLKEMVSVGVRPDAVTLNSFMDSLCKHRRTKEARDIFDSMAAKGHKPNIVSYTIMLNGYVKEGCFDDMTGLINSMLQNGIVPDHHVFNILINAYSKRGLMDEAMHMFEVMKQQGVNPDVVDYLVVMDSLCKMGKMAAAMDKFNQMINQGVSPNKAVYQCLVLGSCSHGDFVKAKELISEAVNRGLCSNSVFFYPVINDLCKEGKVKEAQDMFDFIVGIGQRPDVIMYNSLMDGYCLVGKVEEALRVLDAMKSAGLQPDAITYAILLNGYCKIGRIADGLSLFREMSLSGVKPTTIMYSIILDGLFRSGRTVSAKEKFNTMVESGLPVDVRTYNIVLHGLCRNNCTGEAIELFKKLCATNLKINVITFNTMISAMFKTRRIGEAKDLFATISAIGLVPSVVTYSVMTTNFIKEGLLAEADDMFLAMEKAGCAPDSRLLNHVVSVLLENGAVVKAATYLAKLDAKQLSLEASTVSLIVSLFSRKGKLREHVKLLPVKYQPPEMLG

SEQ ID NO: 229 - protein, 772 aa, Triticum aestivum; identical to SEQ ID NO: 228

SEQ ID NO: 230 - protein, 772 aa, Triticum aestivum
MPTARLSSVFASSFKSSLRKPRAPVAALAAATERVRARTLSQQDAHHLFDELLSQAAAVPERGLNNFLAALARAPPSSACSDGPGLAIALFNRMSQGAGARVVSPTLCTYSILMDCCCRAGRPDLVVAFFGRLIRLGLRLDVIAFSNLLKGLCKAKRSNEALDLLLHRMPELDCAPDVFSYSIVINGCFKEGEVDKACNLFHEMIQLGVQPDVAIYTSIIDALSKCGAMDKAEVVLRQMVDQGIGPDVMTYSSLIHGYSTLGQWKAAVRVLKEMVSVGVRPDAVTLNSFMDSLCKHRRTKEARDIFDSMAAKGHKPNIVSYTIMLNGYVKEGCFDDMTGLINSMLQNGIVPDHHVFNILINAYSKRGLMDEAMHMFEVMKQQGVNPDVVDYLVVMDSLCKMGKMAAAMDKFNQMINQGVSPNKAVYQCLVLGSCSHGDFVKAKELISEAVNRGLCSNSVFFYPVINDLCKEGKVKEAQDMFDFIVGIGQRPDVIMYNSLMDGYCLVGKVEEALRVLDAMKSAGLQPDAITYAILLNGYCKIGRIADGLSLFREMSLSGVKPTTIMYSIILDGLFRSGRTVSAKEKFNTMVESGLPVDVRTYNIVLHGLCRNNCTGEAIELFKKLCATNVKINVITFNTMISAMFKTRRIGEAKDLFATISAIGLVPSVVTYSVMTTNFIKEGLLAEADDMFLAMEKAGCAPNSRLLNHVVRVLLENGAVVKAATYLAKLDAKQLSLEASTVSLIVSLFSRKGKLREHVKLLPVKYQPPEMLD

SEQ ID NO: 231 - protein, 772 aa, Triticum aestivum; identical to SEQ ID NO: 228

SEQ ID NO: 232 - protein, 772 aa, Triticum aestivum; identical to SEQ ID NO: 230

SEQ ID NO: 233 - protein, 772 aa, Triticum aestivum; identical to SEQ ID NO: 228

SEQ ID NO: 234 - protein, 772 aa, Triticum aestivum
MPTARLSSIFTSSFKAPSRERRAPLAALAAATERVRAGTLSRQDAHHLFDELLSQAATVPVRTLNNFLAALARAPPSAACGNGPALAVTLFNGMSRGAGARVVSPTCCTYSILMDCCCRAGRPDLVVAFFGRLLRLGLRLNVISLSNLLKGLCQAKRTNEAVDLLLHRTPELDCVPDVFSYSIVINGCLKEGEVDKACNLFHEMPQLGVQPDVVTYTSIIDALSKSGAMVKAEVVLRRMVGQGIGPNVMTYTSLIHGYSASGQWKAAVRVFKEMVSVGVLPNAVTLNSFMDSLCKHRRTKEARVIFDSMAAKGQKPDIVSYSIMLNGYVKEGCFDDMTGLFNSMLQNGVVPNHHIFNILINAYAKRGLMDEAMHMFEVMRQQGVNPDVFGYQIIMDSFCKMGRMDAALDKFNQMVNQGVSPNKAVYQCLVLGSCSHGDFVKAKELICEAVNRGLCSNSVFFYPVINDLCKEGKVKEAQDMFDFILGIGQRPDVIMYNSLMDGYCLVGKVEEALRVLDAMKSAGLQPTAVTYAILLNGYCKIGKIADGLSLFREMSLSGVKPTTIMYNIILDGLFRSGRTVSAKEKFNTMVESGLPVDVRTYNIVLHGLCRNNCTGEAIELFKKLCATNVKINVITFNTMISAMFKTRRIGEAKDLFATISAIGLVPSVVTYSVMMTNFIKEGLLAEADDMFLAMEKAGCAPNSRLLNHVVRALLEKGAVVKAATYLAKLDAKQLSVEASTISLIVSLFSGEGKLREHVELLPVKYQPPEMLD

SEQ ID NO: 235 - protein, 772 aa, Triticum aestivum; identical to SEQ ID NO: 234

SEQ ID NO: 236 - protein, 772 aa, Triticum aestivum; identical to SEQ ID NO: 234

SEQ ID NO: 237 - protein, 772 aa, Triticum aestivum; identical to SEQ ID NO: 234

SEQ ID NO: 238 - protein, 772 aa, Triticum aestivum; identical to SEQ ID NO: 234

SEQ ID NO: 239 - protein, 772 aa, Triticum aestivum; identical to SEQ ID NO: 234

SEQ ID NO: 240 - protein, 786 aa, Triticum aestivum
MPRFSSTTPMSPLRRRLRARHSSSTSHSSRSWEPHAAFAAAAERARSGNLTPEDAHHLFDELLRQGNPVQDRPLNKLLSALARAPASAACRNGPALAVALFSRISQGARRRVADPTACTYGILMDCCCRAHRLDLTLAFFGGLLKTGLKAGVIQVCTLLKGLCRAKRADEALDVLLHRMPELGCTPNVVAYTTVIHGFFKEGQVGKACNLFHGMAQQGVAPNLVTYNSVIDALCKAKAMDKAEYFLGQMVDDGVVPDNVTYNSLIHGYSSSGHWKEAVRVFKEMTSRRVTADVHTYNMFMTFLCKHGRSKEAAGIFDTMALKGLKPDNVSYAILLHGYATVGCLVDMINLFNSMERDCILPDCRIFNILINAYAKSGKLDKAMLIFNEMQKQGVSPNAVTYSTVIDAFCKKGQLDDAMIKFNQMIDTGVRQGTAVYGSLIQGFCTHGDLVKAKELLTEMMNKGISPPDIKFFHSIMQNLGTEGRVIEARDVLGLIAHIGMRPNVCTFNILIGGYCLVGKMEDASKIFDDMMSYGLEPSNITYGILINGYCKNERINDGLILFKEMLRKGLKPTTFNYNVILDGLFLTGRTVAAKEKFDEMVESGVSVCIDTYSIVLGGLCRNNCSGEAITLFQKLSTMDVKFNITIVNIMIDAFYRVQRNQEAKDLFAAVSANGLVANVFTYTIMMKNLIKEGSVEEADNLFLSMEKSGCTADSYMLNLIVRMLLEKGELVKAGNYMSKVDAMSYSLEAETVSLLISLFSGKGKYREHIGLLPAKYRFREEAATVV

SEQ ID NO: 241 - protein, 503 aa, Triticum aestivum
MTSRRVTADVHTYNMFMTFLCKHGRSKEAAGIFDTMAMKGLKPDNVSYAILLHGYATEGCLVDMINLFNSMERDCILPDCRIFNILIKAYAKSGKLDKAMLIFNEMQKQGASPDAVTYSTVIDAFCKKGQLDDAMIKFNQMIDTGVPQGTAVYGSLIQGFCTHGDLVKAKELVTEMMNKGIPPPDIKFFHSIMQNLCTEGRVIEARDVLGLIAHIGMKPNVCTFNILSGGYCLVGKMEDASKIFDDMMSYGLEPSNITYGILINGYCKNERINDGLILFKEMLCKGLKPTTFNYNVILDGLFLTGRTVAAKEKFDEMVESGVSVCIDTYSIVLGGLCRNNCSGEAIMLFQKLSTMDVKFNITIVNIMIDAFYRVQRNQEAKDLFAAVSANGLVANVFTYTIMMKNLIKEGSVEEADDLFLSMEKSGCTADSYMLNLIVRMLLEKGELVKAGNYMSKVDAMSYSLEAETVSLLISLFSGKGKYREHIGLLPAKYQFREEAATIV

SEQ ID NO: 242 - protein, 786 aa, Triticum aestivum
MPRFSSTTPMSPLRRRLRARHSSSTSHSSRSWEPHAAFAAAAERARSGNLTPEDAHHLFDELLRQGNPVQDRPLNKLLSALARAPASAACRNGPALAVALFSRISQGARRRVAEPTACTYGILMDCCCRAHRLDLTLAFFGGLLKTGLKAGVIQVCTLLKGLCRAKRADEALDVLLHRMPELGCTPNVVAYTTVIHGFFKEGQVGKACNLFHGMAQQGVAPNLVTYNSVIDALCKAKAMDKAEYFLGQMVDDGVVPDNVTYNSLIHGYSSSGHWKEAVRVFKEMTSRRVTADVHTYNMFMTFLCKHGRSKEAAGIFDTMALKGLKPDNVSYAILLHGYATEGCLVDMINLFNSMERDCILPDCRIFNILINAYAKSGKLDKAMLIFNEMQKQGVSPNAVTYSTVIDAFCKKGQLDDAMIKFNQMIDTGVRQGTAVYGSLIQGFCTHGDLVKAKELLTEMMNKGLSPPDIKFFHSIMQNLGTEGRVIEARDVLGLIAHIGMRPNVCTFNILIGGYCLVGKMEDASKIFDDMMSYGLEPSNITYGILINGYCKNERINDGLILFKEMLRKGLKPTTFNYNVILDGLFLTGRTVAAKEKFDEMVESGVSVCIDTYSIVLGGLCRNNCSGEAITLFQKLSTMDVKFNITIVNIMIDAFYRVQRNQEAKDLFAAVSANGLVANVFTYTIMMKNLIKEGSVEEADNLFLSMEKSGCTADSYMLNLIVRMLLEKGELVQAGNYMSKVDAMSYSLEAETVSLLISLFSGKGKYREHIGLLPAKYRFREEAATVV

SEQ ID NO: 243 - protein, 788 aa, Triticum aestivum
MPRFSSTTPLSPLRLRRRLRARHSSSTSHSSRSWEPHAAFAAAAERARSGNLTPEDAHHLFDELLRQGNPVQDRPLNKLLSALARAPASATCRNGPALAVALFSRISQGARRRVAEPTACTYGILMDCCCRAHRLDLVFAFFGRLLRTGLKAGVIQVCTLLKGLCRAKRADEALDVLLHRMPELGCTPNVVAYTTVIHGFFKEGQVGKACNLFHGMAQQGVAPNLVTYNSVIDALCKAKAMDKAEYFLGQMVDDGVVPDNVTYNSLIHGYSSSGHWKEAVRVFKEMTSRRVTADVHTYNMFMTFLCKHGRSKEAAGIFDTMAMKGLKPDNVSYAILLHGYATEGCLVDMINLFNSMERDCILPDCRIFNILINAYAKSGKLDKAMLIFNEMQKQGANPDAVTYSTVIDAFCKKGQLDDAMIKFNQMIDTGVPQGTAVYGSLIQGFCTHGDLVKAKELVTEMMNKGIPPPDIKFFHSIMQNLCTEGRVIEARDVLGLIAHIGMKPNVCTFNILSGGYCLVGKMEDASKIFDDMMSYGLEPSNITYGILINGYCKNERINDGLILFKEMLCKGLKPTTFNYNVILDGLFLTGRTVAAKEKFDEMVESGVSVCIDTYSIVLGGLCRNNCSGEAIMLFQKLSTMDVKFNITIVNIMIDAFYRVQRNQEAKDLFAAVSANGLVANVFTYTIMMKNLIKEGSVEEADDLFLSMEKSGCTADSYMLNLIVRMLLEKGELVKAGNYMSKVDAMSYSLEAETVSLLISLFSGKGKYREHIGLLPAKYQFREEAATIV

SEQ ID NO: 244 - protein, 823 aa, Triticum aestivum
MSRLRLRHCSTTPMSRLRRRRRLSSSTSRPTPSWSPRAAFAAATERVRDGTLGPQDAHHLFDELFQQATPVPERPLNGFLAALTRATPSEACRDGPALALSLFNRVCREEAGMRVAPPTIFTYGVLMNCCCNTRRPELGLAFFGRLLRTGLKADKTVANTVLKCLCCAKRTDDAVKVLLHRMTELGCVPDAFSYAIVLKSLCDDNRSQQALDLLRMMAKEEGVCSPDVVTYNTVIHGFFKEGKIGKACNLFHEMTKQGFVPNVVTYNSVINALCKARAMDNAELFLRQMVDNGVQPNKVTYTSMIHGYSTLGRWKEATKLFREMTSSGLIPDIVTWNSFIDSLCKHGRSKEAAEIFDSMAAKGHRPNIVTYGILLHGYAREGCFADMMSLFNSMEGDGIVANCLVFTILIDAYAKRGMMDEAMLILTEMQGQGLSPDVFTYSTLISALCRKGRLADAMDKLSEMIGTGVQPNTVVYHSLIQGFCTHGDLVKAKELVYEMMTKGIPCPNTAFFSSIVHSLCKEGRVMDAHHIFDLVKDIGERSDIIMFNTLIDGYCLVGEMGKAFSVLDVMISAGIEPDIFTYNTLVNGYFKSGRIDDGLNLFREMSHKEIKPTTVTYNIILDGLFRAGRTVAAKKMLHEMIGCGTTVSLSTYTIILRGLCRNNCTDEAIVMFQKLRTINVKFNITTLNTMINSMYTVQRREEAKDLFAAISDSGLVPNASTYGIMIRNLLKEGSVEEADNMFSSMEKSGCAPCSRLLNDTIRTLLEKGEIVKAGNYMSKVDGKSISLEASTSSLLLSLFSGKGKYREQIQLLPVKYQFFDGVS

SEQ ID NO: 245 - protein, 823 aa, Triticum aestivum
MSRLRLRHCSTTPMSRLRRRRRLSSSTSRPTPSWSPRAAFAAATERVRDGTLGPQDAHHLFDELFQQATPVPERPLNGFLAALTRATPSEACRDGPALALSLFNRVCREEAGMRVAPPTIFTYGVLMNCCCHTRRPELGLAFFGRLLRTGLKADKTVANTVLKCLCCAKRTDDAVKVLLHRMTELGCVPDAFSYAIVLKSLCDDNRSQQALDLLRMMAKEEGVCSPDVVTYNTVIHGFFKEGKIGKACNLFHEMTKQGFVPNVVTYNSVINALCKARATDNAELFLRQMVDNGVQPNKVTYTSMIHGYSTLGRWKEATKLFREMTSSGLIPDIVTWNSFIDSLCKHGRSKEAAEIFDSMAAKGHRPNIVTYGILLHGYAREGCFADMMSLFNSMEGDGIVANCLVFTILIDAYAKQGMMDEAMLILTEMQGQGLSPDVFTYSTLISALCRKGKLADAMDKLSEMIGTGVQPNTVVYHSLIQGFCTHGDLVKAKELVYEMMTKGIPCPNTAFFSSIVHSLCKEGRVMDAHHIFDLVKDIGERSDIIMFNTLIDGYCLVGEMGKAFSVLDVMISAGIEPDIFTYNTLVNGYFKSGRIDDGLNLFREMSHKEIKPTTVTYNIILDGLFRAGRTVAAKKMLHEMIGCGTTVSLSTYTIILRGLCRNNCTDEAIVMFQKLRTINVKFNITTLNTMINSMYTVQRREEAKDLFAAISDSGLVPNASTYGIMIRNLLKEGSVEEADNMFSSMEKSGCAPCSRLLNDTIRTLLEKGEIVKAGNYMSKVDGKSISLEASTSSLLLSLFSGKGKYREQIQLLPVKYQFFDGVS

SEQ ID NO: 246 - protein, 823 aa, Triticum aestivum; identical to SEQ ID NO: 244

SEQ ID NO: 247 - protein, 823 aa, Triticum aestivum; identical to SEQ ID NO: 244

SEQ ID NO: 248 - protein, 823 aa, Triticum aestivum; identical to SEQ ID NO: 245

SEQ ID NO: 249 - protein, 823 aa, Triticum aestivum
MSRLRLRHCSTTPMSRLRRRRRLSSSTSRPTPSWSPRAAFAAATERVRDGTLGPQDAHHLFDELFQQATPVPERPLNGFLAALTRATPSEACRDGPALALSLFNRVCREEAGMRVAPPTIFTYGVLMNCCCHTRRPELGLAFFGRLLRTGLKADKTVANTVLKCLCCAKRTDDAVKVLLHRMTELGCVPDAFSYAIVLKSLCDDNRSQQALDLLRMMAKEEGVCSPDVVTYNTVIHGFFKEGKIGKACNLFHEMTKQGFVPNVVTYNSVINALCKARATDNAELFLRQMVDNGVQPNKVTYTSMIHGYSTLGRWKEATKLFREMTSSGLIPDIVTWNSFIDSLCKHGRSKEAAEIFDSMAAKGHRPNIVTYGILLHGYAREGCFADMMSLFNSMEGDGIVANCLVFTILIDAYAKRGMMDEAMLILTEMQGQGLSPDVFTYSTLISALCRKGKLADAMDKLSEMIGTGVQPNTVVYHSLIQGFCTHGDLVKAKELVYEMMTKGIPCPNTAFFSSIVHSLCKEGRVMDAHHIFDLVKDIGERSDIIMFNTLIDGYCLVGEMGKAFSVLDVMISAGIEPDIFTYNTLVNGYFKSGRIDDGLNLFREMSHKEIKPTTVTYNIILDGLFRAGRTVAAKKMLHEMIGCGTTVSLSTYTIILRGLCRNNCTDEAIVMFQKLRTINVKFNITTLNTMINSMYTVQRREEAKDLFAAISDSGLVPNASTYGIMIRNLLKEGSVEEADNMFSSMEKSGCAPCSRLLNDTIRTLLEKGEIVKAGNYMSKVDGKSISLEASTSSLLLSLFSGKGKYREQIQLLPVKYQFFDGVS

SEQ ID NO: 250 - protein, 819 aa, Triticum aestivum
MPRLRRFSTMPMLHLLRRSSSSTSTSPPLRSWSPHAAFAAATERVRAGALSPEDAHHLFDELLRQATPVPERSLNGFLAALARAPASAACIRDGPALAVALFNRVCREEAGLQVAAPTVCTYNILMGCCCRVHRPDLGLAFFGRLLRTGLKTEQITANTFLKCLCYAKRTEEAVNMLLHGMSELGCVPDAISYSIVLKSLCENSMSQRAFDLLHSGHSTCSFSVVAYSTVIHGFFKEGKTGKACNLFHEMIHQGVDPDVVTCNSIINALCKARAMDKAELVLRQMVDKGVQPNTVTYNCMIHGYSTSGRLKEAVKMLTEMTSRGLIPDIVTYNSLMTSLSKHRRSKEAAEIFYSMTAKGHKPNAASHRILLNGYATEGCFADMIDLFNSMESNGFVADCHVFTILIDAYAKRGMMDEAMLIFTEMREKGVSPDVFTYYTVIAALCRLGRLADAMDRFNEMTDMGVQPNTVVYHSLIQGFCMLGDLVKAKELVSEMMNKGIPRPDIAFFSSIINSLCKEGRVMDAQDIFELVISIDERPDVITFNSLIDGYGLIGQMDKAFGVLDAMVSAGIEPNVVTYSSLLDGYCRNGRIDDALILFREMPRKRIKPNTVTYGIILHGLFRAGRTVAARKMFDEMIEGGIPVSISIYNIILGGLCRNNCADEAITLFQKLGAMNVKFDIITLNTMINAMFKVRRREEANDLFAAISASGLVPNASTYGIMIENILKEGSVEEVDNMFSSMEKSGCAPSSRLINCIIRMLLEKGEIARAGNYLSKVDGKIISLEASTTSLLLSLFSREGKYRENIELLPAKYQFFIGFG

SEQ ID NO: 251 - protein, 570 aa, Triticum aestivum
MIHQGVDPDVVTYNSIIDGLCKARAMDKAELVLRQMVDKGVQPNTVTYNCMIHGYSTSGRLKEAVKMLTEMTSRGLIPDIVTYNSLMTSLCKHGRSKEVAEIFYSMTAKGHKPNAASYRILLNGYATEGCFADMIDLFNSRESNSFVSDCHVFTILIDAYAKRGMMDEAMLIFTEMREKGVSPDVFTYYTVIAALCRLGRLADAMDRFNEMTDMGVQPNTVVYHSLIQGFCMLGDLVKAKELVSEMMNKGIPRPDIAFFSSIINSLCKEGRVMDAQDIFELVISIDERPDVITFNSLIDGYGLIGQMDKAFGVLDAMVSAGIEPNVVTYSSLLDGYCRNGRIDDALILFREMPRKRIKPNTVTYGIILDGLFRAGRTVAARKMFDEMIEGGIPVSISIYNIILGGLCRNNCADEAITLFQKLGAMNVKFYIITLNTMINAMFKVRRREEANDLFAAISASGLVPNASTYGIMIENILKEGSVEEVDNMFSSMEKSDCAPSSRLINYIIRMLLEKGEIARAGNYLSKVDGKIISLEASTTSLLLSLFSREGKYRENIELLPAKYQFFNGFG

SEQ ID NO: 252 - protein, 570 aa, Triticum aestivum; identical to SEQ ID NO: 251

SEQ ID NO: 253 - protein, 397 aa, Triticum aestivum
MIHQGVDPDVVTYNSIIDGLCKARAMDKAELVLRQMVDKGVQPNTVTYNCMIHGYSTSGRLKEAVKMLTEMTSRGLIPDIVTYNSLMTSLCKHGRSKEAAEIFYSMTAKGHKPNAASYRILLNGYATEGCFADMIDLFNSMKSNGFVADCHVFTILIDAYAKRGMMDEAMLIFTEMREKGVSPDVFTYYTVIAALCRLGRLADAMDRFNEMTDMGVQPNTVVYHSLIQGFCMLGDLVKAKELVSEMMNKGIPRPDIAFFSSIINSLCKEGRVMDAQDIFELVISIDERPDVITFNSLIDGYGLIGQMDKAFGVLDAMVSAGIEPNVVTYSSLLDGYCRNGRIDDALILFREMPRKRIKPNTVTYGIILDGLFSAGRTVAARKMFDEMIEGGKPSSRC

SEQ ID NO: 254 - protein, 819 aa, Triticum aestivum
MPRLRRFSTMPMLHLLRRSSSSTSTSPPLRSWSPHAAFAAATERVRAGALSPEDAHHLFDELLRQATPVPERSLNGFLAALARAPASAACIRDGPALAVALFNRVCREEAGLQVAAPTVCTYNILMGCCCRVHRPDLGLAFFGRLLRTCLKTEQITANTFLKCLCYAKRTEEAVNMLLHGMSELGCVPDAISYSIVLKSLCENSMSQRAFDLLHSGHSTCSFSVVAYSTVIHGFFKEGKTGKACNLFHEMIHQGVDPDVVTYNSIINALCKARAMDKAELVLRQMVDKGVQPNTVTYNCMIHGYSTSGRLKEAVKMLTEMTSRGLIPDIVTYNSLMTSLSKHRRSKEAAEIFYSMTAKGHKPNAASYRILLNGYATEGCFADMIDLFNSMESNGFVADCHVFTILIDAYAKRGMMDEAMLIFTEMREKGVSPDVFTYYTVIAALCRLGRLADAMDRFNEMTDMGVQPNTVVYHSLIQGFCMLGDLVKAKELVSEMMNKGIPRPDIAFFSSIINSLCKEGRVMDAQDIFELVISIDERPDVITFNSLIDGYGLIGQMDKAFGVLDAMVSAGIEPNVVTYSSLLDGYCRNGRIDDALILFREMPRKRIKPNTVTYGIILHGLFRAGRTVAARKMFDEMIEGGIPVSISIYNIILGGLCRNNCADEAITLFQKLGAMNVKFDIITLNTMINAMFKVRRREEANDLFAAISASGLVPNASTYGIMIENILKEGSVEEVDNMFSSMEKSGCAPSSRLINCIIRMLLGKGEIARAGNYLSKVDGKIISLEASTTSLLLSLFSREGKYRENIELLPAKYQFFIGFG

SEQ ID NO: 255 - protein, 570 aa, Triticum aestivum
MIHQGVDPDVVTYNSIIDGLCKARAMDKAELVLRQMVDKGVQPNTVTYNCMIHGYSTSGRLKEAVKMLTEMTSRGLIPDIVTYNSLMTSLCKHGRSKEAAEIFYSMTAKGHKPNAASYRILLNGYATEGCFADMIDLFNSMKSNGFVADCHVFTILIDAYAKRGMMDEAMLIFTEMREKGVSPDVFTYYTVIAALCRLGRLADAMDRFNEMTDMGVQPNTVVYHSLIQGFCMLGDLVKAKELVSEMMNKGIPRPDIAFFSSIINSLCKEGRVMDAQDIFELVISIDERPDVITFNSLIDGYGLIGQMDKAFGVLDAMVSAGIEPNVVTYSSLLDGYCRNGRIDDALILFREMPRKRIKPNTVTYGIILDGLFRAGRTVAARKMFDEMIEGGIPVSISIYNIILGGLYRNNCADEAITLFQKLGAMNVKFYIITLNTMINAMFKVRRREEANDLFAAISASGLVPNASTYGIMIENILKEGSVEEVDNMFSSMEKSDCAPSSRLINYIIRMLLEKGEIARAGNYLSKVDGKIISLEASTTSLLLSLFSREGKYRENIELLPAKYQFFNGFG

SEQ ID NO: 256 - protein, 570 aa, Triticum aestivum; identical to SEQ ID NO: 255

SEQ ID NO: 257 - protein, 819 aa, Triticum aestivum; identical to SEQ ID NO: 250

SEQ ID NO: 258 - protein, 819 aa, Triticum aestivum
MPRLRRFSTMPMLHLLRRSSSSTSTSPPLRSWSPHAAFAAATERVRAGALSPEDAHHLFDELLRQATPVPERSLNGFLAALARAPASAACIRYGPALAVALFNRVCREEAGLQVAAPTVCTYNILMGCCCRAHRPDLGLAFFGRLLRTGLKTEQITANTFLKCLCYAKRTEEAVNVLLHGMSELGCVPDAISYSIVLKSLCENSMSQRALDLLHSGHSTCSFSVVAYSTVIHGFFKEGKTGKACNLFHEMIHQGVDPDVVTYNSIINALCKARAMDKAELVLRQMVDKGVQPNTVTYNCMIHGYSTSGRLKEAVKMLTEMTSRGLIPDIVTYNSLMTSLCKHRRSKEAAEIFYSMTAKGHKPNAASYRILLNGYATEGCFADMIDLFNSMESNGFVADCHVFTILIDAYAKRGMMDEAMLIFTEMREKGVSPDVFTYYTVIAALCRLGRLADAMDRFNEMTDMGVQPNTVVYHSLIQGFCMLGDLVKAKELVSEMMNKGIPRPDIAFFSSIINSLCKEGRVMDAQDIFELVISIDERPDVITFNSLIDGYGLIGQMDKAFGVLDAMVSAGIEPNVVTYSSLLDGYCRNGRIDDALILFREMPRKRIKPNTVTYGIILHGLFRAGRTVAARKMFDEMIEGGIPVSISIYNIILGGLCRNNCADEAITLFQKLGAMNVKFDIITLNTMINAMFKVRRREEANDLFAAISASGLVPNASTYGIMIENILKEGSVEEVDNMFSSMEKSGCAPSSRLINCIIRMLLEKGEIARAGNYLSKVDGKIISLEASTTSLLLSLFSREGKYRENIELLPAKYQFFIGFG

SEQ ID NO: 259 - protein, 819 aa, Triticum aestivum; identical to SEQ ID NO: 250

SEQ ID NO: 260 - protein, 819 aa, Triticum aestivum; identical to SEQ ID NO: 250

SEQ ID NO: 261 - protein, 465 aa, Triticum aestivum
  misc_feature (17)..(21): Xaa can be any naturally occurring amino acid
MTAKGHKPNAASHRILXXXXXTEGCFADMIDLFNSMESNGFVADCHVFTILIDAYAKRGMMDEAMLIFTEMREKGVSPDVFTYYTVIAALCRLGRLADAMDRFNEMTDMGVQPNTVVYHSLIQGFCMLGDLVKAKELVSEMMNKGIPRPDIAFFSSIINSLCKEGRVMDAQDIFELVISIDERPDVITFNSLIDGYGLIGQMDKAFGVLDAMVSAGIEPNVVTYSSLLDGYCRNGRIDDALILFREMPRKRIKPNTVTYGIILDGLFRAGRTVAARKMFDEMIEGGIPVSISIYNIILGGLYRNNCADEAITLFQKLGAMNVKFYIITLNTMINAMFKVRRREEANDLFAAISASGLVPNASTYGIMIENILKEGSVEEVDNMFSSMEKSDCAPSSRLINYIIRMLLEKGEIARAGNYLSKVDGKIISLEASTTSLLLSLFSREGKYRENIELLPAKYQFFNGFG

SEQ ID NO: 262 - protein, 570 aa, Triticum aestivum; identical to SEQ ID NO: 251

SEQ ID NO: 263 - protein, 819 aa, Triticum aestivum; identical to SEQ ID NO: 250

SEQ ID NO: 264 - protein, 502 aa, Triticum aestivum
MLDIGVVKDRRRRRRNNGARNDTGDRNCCCMETMMPGRSLNGFLAALARATSSAAPACIRDGPVLVVALFNRLCREQAVVRVAPLTVHTYGILMDCCCRTSRPDLGLAFFGRLLRTGLKTNEIVATTFLKCLCYAKRTDEAVNVLLHRMPELGCVPDAFAYSTVLKSLCDNSMSQQGLDLLHMMAKEGGGCSPNVVAYSTVIHGFFKEGEIGKACNLFHEMMQQGVEPNVWTYSSIIDALCKARAMDKAELVLQQMVNKGVQPNNVTYSCMIHGYSTSGRWKEAAKLLREMKSRGLILDIVTRNSFLASLCKHGRSKEAAEFLDSMTAKGHKPDIVSYCILLHGYGTEGCFADMIDVFYSMESNGIAADCHVFNILINGYAKRGMTEEAMLIFTEMRGQGVSPDVVTYSIVIAALSRMGKLTDAIEKFNEMTALEVQPDTTVYHSLIQGCCIDGDLVKAKELMFEMMNGGIPRPNIVFFNSVINSLCKEGRVMDAHDVLDLL

SEQ ID NO: 265 - protein, 264 aa, Triticum aestivum
MDKAFKILDVMESVGVEPNVVTYSTLLDGYSKNRRIDDALTLFREMPRKRIKPDTVTYGIMLDGLFRAGRTVAAMEMFHEMIESGTTVDILIYNIKLGGLCRHNCVDEAIALFQKLRAMNVKFNIEILNTMINAMYKVQRKEEAKELFATISANGLVPNESTYAVMIRNLLKDGAVEDADNMFSSMDNSGIVPSSRLINDIIRMLLEKGEIAKAGNYLSKVDGKSISLEASTTSLMLSLFSRKGKHQEDIKLLPAKYQIFDGFS

SEQ ID NO: 266 - protein, 822 aa, Triticum aestivum
MAEIRPKSTFCGRKSKHTVGVEVEEELRRRRRMLDIGVVKDRRRRRRNNGARNDTGDRNCCCMETMMPGRSLNGFLAALARATSSAAPACIRDGPVLVVALFNRLCREQAVVRVAPLTVHTYGILMDCCCRTSRPDLGLAFFGRLLRTGLKTNEITATTFLKCLCYAKRTDEAVNVLLHRMPELGCVPDAFAYSTVLKSLCDNSMSQQGLDLLHMMAKEGGGCSPNVVAYSTVIHGFFKEGEIGKACNLFHEMMQQGVEPNVWTYSSIIDALCKARAMDKAELVLQQMVNKGVQPNNVTYSCMIHGYSTSGRWKEAAKLLREMKSRGLILDIVTRNSFLASLCKHGRSKEAAEFLDSMTAKGHKPDIVSYCILLHGYGTEGCFADMIDVFYSMESNGIAADCHVFNILINGYAKRGMTEEAMLIFTEMRGQGVSPDVVTYSIVIAALSRMGKLTDAIEKFNEMTALEVQPDTTVYHSLIQGCCIDGDLVKAKELMFEMMNGGIPRPNIVFFNSVINSLCKEGRVMDAHDVLDLVIGIGERPNVITFNSLIDGYCLVGNMDKAFKILDVMESVGVEPNVVTYSTLLDGYSKNRRIDDALTLFREMPRKRIKPDTVTYGIMLDGLFRAGRTVAAMEMFHEMIESGTTVDILIYNIKLGGLCRNNCVDEAIALFQKLRAMNVKFNIEILNTMINAMYKVQRKEEAKELFATISANGLVPNESTYAVVIRNLLKGGAVEDADNMFSSKDNSGIVPSSRLINDIIRMLLEKGEIAKAGNYLSKVDGKSISLEASTASLMLSLFSRKGKHQEDIKLLPAKYQFFDGFG

SEQ ID NO: 267 - protein, 502 aa, Triticum aestivum; identical to SEQ ID NO: 264

SEQ ID NO: 268 - protein, 264 aa, Triticum aestivum; identical to SEQ ID NO: 265

SEQ ID NO: 269 - protein, 822 aa, Triticum aestivum; identical to SEQ ID NO: 266

SEQ ID NO: 270 - protein, 822 aa, Triticum aestivum; identical to SEQ ID NO: 266

SEQ ID NO: 271 - protein, 502 aa, Triticum aestivum; identical to SEQ ID NO: 264

SEQ ID NO: 272 - protein, 264 aa, Triticum aestivum; identical to SEQ ID NO: 265

SEQ ID NO: 273 - protein, 392 aa, Triticum aestivum
MSQQGLDLLHMMAKEGGGCSPNVVAYSTVIHGFFKEGEIGKACNLFHEMMQQGVEPNVWTYSSIIDALCKARAMDKAELVLQQMVNKGVQPNNVTYSCMIHGYSTSGRWKEAAKLLREMKSRGLIPDIVTRNSFLASLCKHGRSKEAAEFLDSMTAKGHKPDIVSYCILLHGYGTEGCFADMIDLFNSMESNGIAADCHVFNILINGYAKRGMTEEAMLIFTEMRGRVSPDVVTYSIVIAALSRMGKLTDAIEKFNEMTALEVQPDTTVYHSLIQGCCIDGDLVKAKELMFEMMNGGIPRPNIVFFNSVINSLCKEGRVMDAHDVLDLVIGIGERPNVITFNSLIDGYCLVGNMDKAFKILDVMESVGVEPNVVTYSAILMAILKTEGLMML

SEQ ID NO: 274 - protein, 769 aa, Triticum aestivum
MPAARLSSFKAPSRERRPPLAALAAATERVRAGTLSRQDAHHLFDELLSQAATVPVRKLNNFLAALARAPPSAACSDGPGLAIALFNRMSRGAGARVVSPTLCTYSILMDCCCRARRPDLVVAFFGRLLRLGLRLEVISFNNLLKGLCQAKRSNEALDMLLHRTPELHCAPDVFSYNIVINGCLKEGEVDKACNLFHEMPQLGVQPDVVTYTSIMDALSKSGAMDKAEVLLRQMVDQGIEPNIKTYSYLIHGYSTFGQWKEALRVFKEMASLGVVPDVVTLTSLIDSLCKHRRTKEAREIFDSMAAKGLKPNIVSYSTMPNGYVKEGSFEDMTDLFNSMVRNGIVPNHHIFNILINAYAKRGVMDEAMHMFEVMRQQGVNPDVFDYQIIMDSLCKMGRMDAALDKFNQMVNQGVSPNKAVYQCLVLGSCSHGHFVKAKELISEVVNRGLCSNTVFFYPVINGLCKEGKVKEAQDMFDFILGIGQRPDVIMYTSLMDGYCLVGEVEKALSVLDAMKSAGLQPDDVVYATLLNGYCKIGRIADGLSLFREMSLSGVKPMTIIYNIILDGLFCSGRTVCAKEKFNTMTESGIPVGVDTYNIVLSGLCRNNCTDEAIELFKKLRATNVKIDVITLTTMISAMFKTRRIEEAKDLFATISAIGFMPSVVTYSVMMTNFIKEGLLAEADDMFLTMEKASCASNSSLLNQVVRALLEKGAVVKAATYLAKLDAKQLSVEASTISLIVSLFSREGKLREHVELLPVKYQPPQSSADN

SEQ ID NO: 275 - protein, 769 aa, Triticum aestivum; identical to SEQ ID NO: 274

SEQ ID NO: 276 - protein, 406 aa, Triticum aestivum
MDEAMHMFEVMRQQGVNPDVFDYQIIMDSLCKMGRMDAALDKFNQMVNQGVSPNKAVYQCLVLGSCSHGHFVKAKELISEVVNRGLCSNSVFFYPVINGLCKEGKVKEAQDMFDFILGIGQRPDVIMYTSLMDGYCLVGEVEKALSVLDAMKSAGLQPDDVVYATLLNGYCKIGRIADGLSLFREMSLSGVKPMTIIYNIILDGLFCSGRTVCAKEKFNTMTESGIPVGVDTYNIVLSGLCRNNCTDEAIELFKKLRATNVKIDVITLTTMISAMFKTRRIEEAKDLFATISAIGLVPSVVTYSVMMTNFIKEGLLAEADDMFLTMEKASCASNSSLLNQVVRALLEKGAVVKAATYLAKLDAKQLSVEASTISLIVSLFSREGKLREHVELLPVKYQPPQSSADN

SEQ ID NO: 277 - protein, 769 aa, Triticum aestivum; identical to SEQ ID NO: 274

SEQ ID NO: 278 - protein, 275 aa, Triticum aestivum
MDGYCLVGEVEKALSVLDAMKSAGLQPDDVVYATLLNGYCKIGRIADGLSLFREMSLSGVKPTTIIYNIILDGLFCSGRTVCAKEKFNTMTESGIPVGVDTYNIVLSGLCRNNCTDEAIELFKKLRATNVKIDVITFNTMISAMFKTRRIEEAKDLFATISAIGLVPSVVTYSVMMTNFIKEGLLAEADDMFLTMEKASCAPNSSLLNQVVRALLEKGAVVKAATYLAKLDAKQLSVEASMISLIVSLFSREGKLREHVELLPVKYQPPQSSADN

SEQ ID NO: 279 - protein, 785 aa, Triticum aestivum
MSPLRLRLRLRPRLHARHSYSTSHPSRSQGWDPHAAFAAATERARSGNLTSEDAHKLFDQLLLQANPVNMRLPNDLLTALARAPASAACSNGPALALALFSRLSQGARQRVVQPTACTYGILMDCCCRANRQDLALAFFARLLRTGLKAGVIEVNTLLKGLCRAKRADEALDILLHRMPELGCTPNVVAYNTVIHGFFQEGQAGKACSLFHEMAQQGVAPSLVTYNSVIDALCKARAMDKAEYFLRQMVDDGVVPDNVTYNSLIHGYSSSGHWKEAVRVFKEMTSRRVKPIVHTHNMFMTFLCKHGRSKEAAGIFDTMAMKGLKHNNVSYAILLHGYATEGCLVDMINLFNSMERYCILPDCRIFNILINAHAKSGKLDKAMLIFNEMQKQGVSPNAVTYSTIIHAFCKKGRLDDAVIKFNQMIDTGVRQGTAVYRSLIQGFCTHGDLVKAKELLTEMMNKGMLPPDIAFFNSIMQNLCTEGRVIEARDVLGLIAHIGMRPDVCTFNILIGGYCLVGKMEHASKIFDDMMSYGLEPSNITYGILINGYCKNRRIDDGLILFKEMLHKGLKPTTFNYNVILDGLFLAGRTVAAKEKFDEMVESGVSVCIGTYSIVLGGLCRNNCSGEAITLFQKLSTMDVKFNIIIVNIMIDAFYKVQRNQEAKDLFAAVSANGLVANVFTYTIMMKNLIKEGSVEEADDLFLSMEKSSCTADSYMLNLIVRMLLGKGEIVKAGNYISKIDAKSYSLEAKTVSLLISLFSGKGKYREHIGLLPAKYRFREEAATVV

SEQ ID NO: 280 - protein, 505 aa, Triticum aestivum
MSPLRLHARRSYSTSHPPRSQGWDPHAAFAAATERARSGNLTSEDAHKLFDQLLLQANPVNMRLPNDLLTALARAPASAACSNGPALALALFSRLSQGARQRVVQPTACTYGILMDCCCRANRQDLALAFFARLLRTGLKAGVIEVNTLLKGLCRAKWADEALDILLHRMPELGCTPNVVAYNTVIHGFFQEGQAGKACSLFHEMAQQGVAPSLVTYNSVIDALCKARAMDKAEYFLRQMVDDGVIPDNVTYNSLIHGYSSSGHWKEAVRVFKEMTSRRVKPNVHTHNMFMTFLCKHGRSKEAAGIFDTMAMKGLKHNNVSYAILLHGYATEGCLVDMINLFNSMERYCILPDCRIFNILIHAHAKSGKLDKAMLIFNEMQKQGVSPNAVTYSTIIHAFCKKGRLDDAVIKFNQMIDTGVRQGTAVYRSLIQGFCTHGDLVKAKELLTEMMNKGMLPPDIAFFNSIMQNLCTEGRVIEARDVLGLIAHIGMRPDVCTFNILVDTA

SEQ ID NO: 281 - protein, 785 aa, Triticum aestivum; identical to SEQ ID NO: 279

SEQ ID NO: 282 - protein, 669 aa, Triticum aestivum
MRSSPAPSSSASSVQNGQMKLLNVLLHRTSVLGCVPNSFSYNIVLKSLCDDSRSQQALGLLQVMAKGDDCSPGVLSYSTLIHGFFKEGEVGKACNLFHEMMRQGVVPDVVTYSSIIDALCKAGAMDKAELFLRQMVDNSVRPDTVTYTSMIHGYSTLGRWKEATKMFREMTSRGLIPNIVTWNSFMASLCKHGKSKEAAEIFFSMAARGHKPDIISYTILLHGYANEGSFADMMNLFNSMVGDGIVANCQVFNILIDAYAKQRMMDEAMIILNKMRGQGLSPDVFTYSTLVSALCKMVRLADAMGKFSQMIGRGVQPNTVVYHSVVQGLCTHGVLVKAKELVNEMMNKGMLRPNIAFFNSIMDNLCNEGRVVDAHHIFDLITDIGEKPDVITFSTLIDGYCLVGEMEKACGVLDAMVSAGIEPDVITYNTLVSGYCKSGRIDDGLNLFREMFHMEVKPTTVTYNIILDGLFHAGRTVAAKKMLHEMIGSGTPVSMHTYDIFIRGLCRNDCTDEAIALFQKLGALNVKFDIAILNSMINAMYKVQRREEANKLFAAISTSGLVPNASTYGIMIRNLLKEGSVEEAEDMFSSMEKSDCALSSRLINDIIRMLLEKGEIVKAGEYMSKVDGKSISLEASTSSLLLSLFSGKGKYREQIQLLPAKYQFFDGTI

SEQ ID NO: 283 - protein, 669 aa, Triticum aestivum; identical to SEQ ID NO: 282

SEQ ID NO: 284 - protein, 812 aa, Triticum aestivum
MSCLHLLRRRTSSFTPTSPPSRSWSPHAAFAAATERVRAGTLTPQDAHHLFDQLLRQSTPVPGQALNGFLAGLARARDTDACRDGPSLALTLFNRVCREEAGRRVAPPTIYTYGILMNCCCHVRRPDLGLAYFGRLLRTGLNTNEVVASTLLKCLCCAKRADEAVNVLLHRTSVLGCVPNSFSYNIVLKSLCDDSRSQQALGLLQVMAKGDDCSPGVLSYRTLIHGFFKEGEVGKACNLFHEMMRQGVVPDVVTYSSIIDALCKAGAMDKAELFLRQMVDNSVRPDTVTYTSMIHGYSTLGRWKEATKMFREMTSRGLIPNIVTWNSFMASLCKHGKSKEAAEIFFSMAARGHKPDIISYTILLHGYANEGSFADMMNLFNSMVGDGIVANCQVFNILIDAYAKQGMMDEAMIILNKMRGQGLSPDVFTYSTLVSALCKMGRLADAMGKFSQMIGRGVQPNTVVYHSLVQGLCTHGVLVKAKELVNEMMNKGMLRPNIAFFNSIMDNLCNEGRVVDAHHIFDLVTDIGEKPDVITFTTLIDGYCLVGEMEKACGVLDAMVSAGIEPDVITYNTLVSGYCKSGRIDDGLNLFREMSHMEVKPTTVTYNIILDGLFHAGRTVAAKKMLHEMIGSGTPVSMHTYDIFIRGLCRNDCTNEAIALFQKLGALNVKFDIAILNSMINAMYKVQRREEANKLFAAISTTGLVPNASTYGIMIRNLLKEGSVEEAEDMFSSMEKSDCALSSRLINDIIRMLLEKGEIVKAGEYMSKVDGKSISLEASTSSLLLSLFSGKGKYREQIQLLPAKYQFFDGTI

SEQ ID NO: 285 - protein, 669 aa, Triticum aestivum; identical to SEQ ID NO: 282

SEQ ID NO: 286 - protein, 812 aa, Triticum aestivum; identical to SEQ ID NO: 284

SEQ ID NO: 287 - protein, 812 aa, Triticum aestivum; identical to SEQ ID NO: 284

SEQ ID NO: 288 - protein, 788 aa, Triticum aestivum
MPRFSTTTPMSPPRLRLRLGARHSSSTSHPSCIWDPHAAFAAATQRARSGKLTTEDAHHLFDELLRQGNPVQERPLTNFLAALARAPASASCSDGPALAVALFGRLSRGAGRGVAQPNVFTYGVLMDCCCRARFPDLALAFFGRLLRTGLKADQVVFSTLLKGLCHAKRSDEALDVLLHRMPELGCTPDVVVYNTVIHGFFREGQAGKACDLFHGMAQQGVMPDVVTYNSVIDALCKARAMDKAEYFLRQMVDDGVVPDNVTYSSLIHGYSSSGHWKEAVRVFKEMTSRRVTPDVHTYNMFMTFLCKHGRSKEAAGIFDTMAMKGLKPDNISYAIRLHGYATEGCLVDMINLFNSMERDCILPDCRIFSILINAYAKSGKLDKAMLIFNKMQKQGVSPNAVTYSTVIDAFCKKGQLDDAMIKFNQMIDTGVRQGTAVYGSLIQGFCTHGDLVKAKELLTEMMNKGIPPPDIKFFHSIMQNLCTEGRVIEARDVFGLMAHIGIRPNVCTFNILIGGYCLVGKMEDASKIFDDMMSYGLEPSNITYGILINGYCKNERIDDGLILFKEMLRKGVKPSTFNYNIILDGLFLAGRTVAAKEKFDEMVESGVSVCIDTYSIVLGGLCRNNCSGEAIMLFQKLSTMDVKFNIIIVNIMIDAFYRVQRNQEAKDLFAAVSANGLVANVFTYTIMMKNLIKEGSVEEADDLFLSMEKSGCTADSYMLNLIVRMLLEKGELVKAGNYMSKVDAKSYSLEAETVSLLISLFSGKGKYREHIGLLPTKYQFREEAATVE

SEQ ID NO: 289 - protein, 621 aa, Triticum aestivum
MIKRDVDKITEGCRLAHSHWYNLEKHSPVVLLPVEFATYTPAMPRFSSTTPMSPPRLRLRLRLCARHSSSTSHPSRIWDPHAAFAAATERARSGNLTPEDAHHLFDELLRQGNPVQERPLTNFLAALARAPASASCSDGPALAVALFGRLSRGAGRGVAQPNVFTYGVLMDCCCRARFPDLALAFFGRLLRTGLKADQVVFSTLLKGLCHAKRSDEALDVLLHRMPELGCTPYVVAYNTVIHGFFREGQAGKACDLFHGMAQQGVMPDVVTYNSVIDALCKARAMDKAEYFLRQMVDDGVVPDNVTYSSLIHGYSSSGHWKEAVRVFKEMTSRRVTPDVHTYNMFMTFLCKHGRSKEAAGIFDTMAMKGLKPDNISYAIRLHGYATEGCLVDMINLFNSMERDCILPDCRIFSILINAYAKSGKLDKAMLIFNKMQKQGVSPNAVTYSTVIDAFCKKGQLDDAMIKFNQMIDTGVRQGTAVYGSLIQGFCTHGDLVKAKELLTEMMNKGIPPPDIKFFHSIMQNLCTEGRVIEARDVLGLMAHIGIRPNVCTFNILIGGYCLVGKMEDASKIFDDMMSYGLEPSNITYGILINGYCKNERIDDGLILFKEMLRKGVKPSKF

SEQ ID NO: 290 - protein, 792 aa, Triticum aestivum
MPRFSSSTPMSPPRLRLRLRLRLCARHSSSTSHPSRIWDPHAAFAAATQRARSGKLTTEDAHHLFDELLRQGNPVQERPLTNFLAALARAPASASCSDGPALAVALFGRLSRGAGRGVAQPNVFTYGVLMDCCCRARFPDLALAFLGRLLRTGLKADQVVFSTLLKGLCHAKRSDEALDVLLHRMPEQGCTPYVVAYNTVIHGFFREGQAGKACDLFHGMAQQGVMPDVVTYNSVIDALCKARAMDKAEYFLRQMVDDGVVPDNVTYSSLIHGYSSSGHWKEAVRVFKEMTSRRVTPDVHTYNMFMTFLCKHGRSKEAAGIFDTMAMKGLKPDNISYAIRLHGYATEGCLVDMINLFNSMERDCILPDCRIFSILINAYAKSGKLDKAMLIFNKMQKQGVSPNAVTYSTVIDAFCKKGQLDDAMIKFNQMIDTGVRQGTAVYGSLIQGFCTHGDLVKAKELLTEMMNKGIPPPDIKFFHSIMQNLCTEGRVIEARDVLGLMAHIGIRPNVCTFNILIGGYCLVGKMEDASKIFDDMMSYGLEPSNITYGILINGYCKNERIDDGLILFKEMLRKGVKPSTFNYNIILDGLFLAGRTVAAKEKFDEMVESGVSVCIDTYSIVLGGLCRNNCSGEAIMLFQKLSTMDVKFNIIIVNIMIDAFYRVQRNQEAKDLFAAVSANGLVANVFTYTIMMKNLIKEGSVEEADDLFLSMEKSGCTADSYMLNLIVRMLLEKGELVKAGNYMSKVDAKSYSLEAETVSLLISLFSGKGKYREHIGLLPTKYQFREEAATVE

SEQ ID NO: 291 - protein, 784 aa, Triticum aestivum
MPRLSSTTPMSPLRLRARHSSSTSHPSRIWDPHTAFATATERARSGNLTPEDAHHLFDELLRQANPVQERPLNNLLAALARAPASAACSDGPALAVNLFSRISEGARRRVAHPTACTYGILMDCCCRANRQDLALAFFARLLRTGLKAGVIEVNTLLKGLCRAKRADEALDILLHRMPELGCTPNVVAYNTVIHGFFREGQVGKACNLFHEMRQQGVTPDVVTYNSVIDALCKAKAMDKAEYFLGQMVDDGVVSDNVTYNSLIHGYSSSGHWKEAVRVFKEMTSRRVTPDLHTYNMFMTFLCNHGRSKEAAGIFDSMAMKGLKPDNVSYAIRLHGYATEGCLVDMINLFNSMERDCILPDCRIFSILIYAYAKSGKLDKAMLIFNEMQKQGVSPNAVTYSTVIDAFCKKGQLDDAMIKFNQMIDTGVRQGTAVYRSLIQGFCTHGDLVKAKELLTEMMNKGIPPPDIKFFHSIMQNLCTEGRVIEARDILGLIAHIGMRPNVCTFNILIGGYCLVRKMADASKVFDDMVSYGLEPCNFTYGILINGYCKNRRIDDGLILFKEMLHKGLKPTTVNYNVILDGLFLAGQTVAAKEKFDEMVESGVSVCIDTYSIVLGGLCRNSCSSEAITLFRKLSAMNVKFDIKIVNIIIGAFYRVKRNQEAKDLFAAIPANGLVPNAVTYTIMMTNLIKEGSVEEADNLFLSMEKSGSTANSWMLNHIIRRLLERGEIVKAGNYMSKVDVKSYSLEAKTVSLLISLFSREGEYRDHIKLLPIKYQFLEKPATVE

SEQ ID NO: 292 - protein, 784 aa, Triticum aestivum; identical to SEQ ID NO: 291

SEQ ID NO: 293 - protein, 788 aa, Triticum aestivum
MPRFSSTTSMSSLRLRLHARHSSSASQPSHSQGWDPHAAFAAATERARSGSLTPVDAHHLFDELLRQTNPVQEQPLNNLLAALARAPASNACRDGPALAVALFSRISQGARLRVAQPTACTYGILMDCCCRAHRLDLAFAFFGRLLRTGLKAGVIQLCTLLKGLCRAKRADEAMDVLLHRMPELGCTPNVVAYTTVIHGFLKEGQVGKACNLFHGMAQQGVAPNVVTYNSVIDALCKARAMGKAEMVLGQMVVNGVGPSNVTYNTLIHGYSSSGHQKEAVRVLKEMRSQGIIPDVFTCSSLMASLCNNGKSKEAEEILHSMVMKGLKPDIVSYSTLLHGYATEGCLVGMTNLFNSMTRYGIRPNSHAFNILINVCAKSGMMDEAMLIFKEMQKRGVSPNLVTYSTVIHAFCKMGSLDIAMDKFNQMVDIGVRPDAIVYRSLIHGFCTHGDLVKPKELVTEMRNKGMRPPDIKFFHSIMQNLCTEGRVIEARDILDLIVRIGMRPDVFIFNILIGGYCLVRKMADASKIFDDMVSYGLEPSNITYGILINGYCKNRRIDEGLILFKEMLCKGLKPTTFNYNVILDGLFLAGRTVAAKEKFDEMVESGVSVCIDTYSIFLAGLCRNNCFSEVIMLFQKLSAMNMKFNIRIVNIMIDAFYKVRRNHEAKDLFAAIPSNGLVANVVTYSIMMTNLIKEGSVEEADTLFLSMEKSGCTANSWMLNHIIRRLLERGEIVKAGNYMSKVDAKSYSLEAKTVLLLISLFSGKGKYREHIKLLPMKYQFLEEPDTVE

SEQ ID NO: 294 - protein, 788 aa, Triticum aestivum
MPRFSSTTSMSSLRLRLHARHSSSASQPSHSQGWDPHAAFAAATERARSGSLTPVDAHHLFDELLRQTNPVQEQPLNNLLAALARAPASNACRDGPALAVALFSRISQGARLRVAQPTACTYGILMDCCCRAHRLDLAFAFFGRLLRTGLKAGVIQLCTLLKGLCRAKRADEAMDVLLHRMPELGCTPNVVAYTTVIHGFLKEGQVGKACNLFHGMAQQGVAPNVVTYNSVIDALCKARAMGKAEMVLGQMVVNGVGPSNVTYNTLIHGYSSSGHQKEAVRVLKEMRSQGIIPDVFTCSSLMASLCNNGKSKEAEEILHSMVMKGLKPDIVSYSTLLHGYATEGCLVGMTNLFNSMTRYGIRPNSHAFNILINVCAKSGMMDEAMLIFKEMQKRGVSPNLVTYSTVIHAFCKMGSLDIAMDKFNQMVDIGVRPDAIVYRSLIHGFCTHGDLVKPKELVTEMRNKGMRPPDIKFFHSIMQNLCTEGRVIEARDILDLIVRIGMRPDVFIFNILIGGYCLVRKMADASKIFDDLVSYGLEPSNITYGILINGYCKNRRIDEGLILFKEMLCKGLKPTTFNYNVILDGLFLAGRTVAAKEKFDEMVESGVSVCIDTYSIFLAGLCRNNCFSEVIMLFQKLSAMNMKFNIRIVNIMIDAFYKVRRNHEAKDLFAAIPSNGLVANVVTYSIMMTNLIKEGSVEEADTLFLSMEKSGCTANSWMLNHIIRRLLERGEIVKAGNYMSKVDAKSYSLEAKTVLLLISLFSGKGKYREHIKLLPMKYQFLEEPDTVE

SEQ ID NO: 295 - protein, 790 aa, Triticum aestivum
MPRFSSTTPMASLRLRLRLHARNYSSASQPSHGQGWDPHAAFAAATERARSGSLTPADAHHLFDELLRQANPVQERPLNNLLAAIARAPASNACRNGPALAVALFSRISQGARLWVVQPTACTYGILMDCCCRAHRLDLAFAFFGRLLRTGLKAGVIQLCTLLKGLCRAERADEAMDVLLHRMPELGCTPNVVAYTTVIHGFLKEGQVGKACNLFHGMAQQGVAPNVVTYNSFIDALCKARAMGKAEMVLGQMVVNGVGPSNVTYNTLIHGYSSSGHQKEAVRVLKEMRSQGIIPDVFTCSSLMASLCNNGKSKEAEEILHSMVMKGLKPDIVSYSTLLHGYATEGCLVGMTNLFNSMTRYGIRPNSHAFNILINVCAKSGMMDEAMLIFKEMQKRGVSPNLVTYSTVIHAFCKMGSLDIAMDKFNQMVDIGVRPDAIVYRSLIHGFCTHGDLVKPKELVTEMRNKGMRPPDIKFFHSIMQNLCTEGRVIEARDILDLIVRIGMRPDVFIFNILIGGYCLVRKMADASKIFDDMVSYGLEPSNITYGILINGYCKNRRIDEGLILFKEMLCKGLKPTTFNYNVILDGLFLAGRTVAAKEKFDEMVESGVSVCIDTYSIFLAGLCRNNCFSEVIMLFQKLSAMNMKFNIRIVNIMIDAFYKVRRNHEAKDLFAAIPSNGLVANVVTYSIMMTNLIKEGSVEEADTLFLSMEKSGCTANSWMLNHIIRRLLERGEIVKAGNYMSKVDAKSYSLEAKTVLLLISLFSGKGKYREHIKLLPMKYQFLEEPDTVE

SEQ ID NO: 296 - protein, 815 aa, Triticum aestivum
MSTSSSTCSLVQLGKALHSSCSRFHHAMPRLSSTTPMSPPHLRLRLGARHSSSTSHLSRIWDPHAAFAAATERVRSGSLTPADAHHLFDELLRQTNPVQEQPLNNLLAALARAPASNACRDGPALAVALFSRISQGARLWVVQPTACTYGILMDCCCRAHRLDLAFAFFGRLLRTGLKAGVIQLCTLLKGLCRAERADEAMDVLLHRMPELGCTPNVVAYTTVIHGFLKEGQVGKACNLFHGMAQQGVAPNVVTYNSVIDALCKARAMGKAEMVLGQMVVNGVGPSNVTYNTLIHGYSSSGHQKEAVRVLKEMRSQGIIPDVFTCSSLMASLCNNGKSKEAEEILHSMVMKGLKPDIVSYSTLLHGYATEGCLVGMTNLFNSMTRYGIRPNSHAFNILINVCAKSGMMDEAMLIFKEMQKRGVSPNLVTYSTVIHAFCKMGSLDIAMDKFNQMVDIGVRPDAIVYRSLIHGFCTHGDLVKPKELVTEMRNKGMRPPDIKFFHSIMQNLCTEGRVIEARDILDLIVRIGMRPDVFIFNILIGGYCLVRKMADASKIFDDMVSYGLEPSNITYGILINGYCKNRRIDEGLILFKEMLCKGLKPTTFNYNVILDGLFLAGRTVAAKDKFDEMVESGVSVCIDTYSIFLAGLCRNNCFSEVIMLFQKLSAMNMKFNIRIVNIMIDAFYKVRRNQEAKDLFAAIPSNGLVANVVTYSIMMTNLIKEGSVEEADTLFLSMEKSGCTANSWMLNHIIRRLLERGEIVKAGNYMSKVDAKSYSLEAKTVLLLISLFSGKGKYREHIKLLPMKYQFLEEPDTVE

SEQ ID NO: 297 - protein, 792 aa, Triticum aestivum
MPRFSSTTPMSPLRLRLRLRLRLGARHSSSTSHSSRSWDPHSAFAAAAERARSGNLTPEDAHHLFDELLRQGNPIQDRPLNKLLSALARAPASATCRNGPALAVALFSRISQGARRRVAEPTACTYGILMDCCCRAHRLDLVFAFFGRLLRTGLKAGVIQVCTLLKGLCRAKRADEALDVLLHRMPELGCTPNVVAYTTVIHGFFKEGQVGKACNLFHGMAQQGVAPNLVTYNSVIDALCKAKAMDKAEYFLGQMVDDGVVPDNVTYNSLIHGYSSSGHWKEAVRVFKEMTSRRVTADVHTYNMFMTFLCKHGRSKEAAGIFDTMAMKGLKPDNVSYAILLHGYATEGCLVDMINLFNSMERDCILPDCRIFNILINAYAKSGKLDKAMLIFNEMQKQGVSPNAVTYSTVIDAFCKKGQLDDAMIKFNQMIDTGVRQGTAIYGSLIQGFCTHGDLVKAKELATEMMNKGIPPPDIKFFHSIMQNLCTEGRVIEARDVLGLIAHIGMRPNVCTFNILIGGYCLVGKMEDASKIFDDMMSYGLEPSNITYGILINGYCKNERINDGLILFKEMLRKGLKPTTFNYNVILDGLFLAGRTVAAKEKFDEMVEFGVSVCIDTYSIVLGGLCRNNCSGEAITLFQKLSTIDVKFNITIVNIMIDAFYRVQRNQEAKDLFAAVSANGLVANVFTYTIMMKNLIKEGSVEEADDLFLSMEKSGCTADSYMLNLIVRMLLGKGEIVKAGNYISKIDAKSYSLEAKTVSLLISLFSGKGKYREHIGLLPAKYRFREEAATVV

SEQ ID NO: 298 - protein, 268 aa, Triticum aestivum
MPRFSAATPMSPLRLRLRLRARHSSSTSHSSRSWDPHSAFAAAAERARSGNLTPEDAHHLFDELLRQGNPVQDRPLNKLLSALARAPASATCRNGPALAVALFSRISQGARRRVAEPTACTYGILMDCCCRAHRLDLVFAFFGRLLRTGLKAGVIQVCTLLKGLCRAKRADEALDVLLHRMPELGCTPNVVAYTTVIHGFFKEGQVGKACNLFHGMAQQGVAPNLVTYNSVIDALCKAKAMDKAEYFLGQMVDDGVVPDNVTYNSLIH

SEQ ID NO: 299 - protein, 792 aa, Triticum aestivum; identical to SEQ ID NO: 297

SEQ ID NO: 300 - protein, 790 aa, Triticum aestivum
MPRFSSTTPMSPLRLRLRLRLGARHSSSTSHSSRSWDPHSAFAATAERARSGNLTPEDAHHLFDELLRQGNPIQDRPLNKLLSALARAPASATCRNGPALAVALFSRISQGARRRVAEPTACTYGILMDCCCRAHRLDLVFAFFGRLLRTGLKAGVIQVCTLLKGLCRAKRADEALDVLLHRMPELGCTPNVVAYTTVIHGFFKEGQVGKACNLFHGMAQQGVAPNLVTYNSVIDALCKAKAMDKAEYFLGQMVDDGVVPDNVTYNSLIHGYSSSGHWKEAVRVFKEMTSRRVTADVHTYNMFMTFLCKHGRSKEAAGIFDTMAMKGLKPDNVSYAILLHGYATEGCLVDMINLFNSMERDCILPDCRIFNILINAYAKSGKLDKAMLIFNEMQKQGVSPNAVTYSTVIDAFCKKGQLDDAMIKFNQMIDTGVRQGTAIYGSLIQGFCTHGDLVKAKELATEMMNKGIPPPDIKFFHSIMQNLCTEGRVIEARDVLGLIAHIGMRPNVCTFNILIGGYCLVGKMEDASKIFDDMMSYGLEPSNITYGILINGYCKNERINDGLILFKEMLRKGLKPTTFNYNVILDGLFLAGRTVAAKEKFDEMVEFGVSVCIDTYSIVLGGLCRNNCSGEAITLFQKLSTIDVKFNITIVNIMIDAFYRVQRNQEAKDLFAAVSANGLVANVFTYTIMMKNLIKEGSVEEADDLFLSMEKSGCTADSYMLNLIVRMLLGKGEIVKAGNYISKIDAKSYSLEAKTVSLLISLFSGKGKYREHIGLLPAKYRFREEAATVV

SEQ ID NO: 301 - protein, 773 aa, Triticum aestivum
MSNTRLSSTFTSSLKAPSRKPRAPRLAALAAATERVRAGTLTRQDARQLFDELLSQAATVPVRTLNNFLAALSRAPPSAACSDGPGLAIALFNHMSQGAGARVVSPTLCTYSILMDCCCRARRPDLVVSFFGRLLRLGLRLNVISFNNLLKGLCQAKRTNEAVDLLLHRTPELDCVPNVFSYSIVINGCFKQGEVDKACNLFNQMPQLGVQPDVVIYNSIIDALSKSGAMDKAEVVLRQMVDQGIGPNVMTYTSLIHGYSASGQWKAAVRVFKEMVSVGVQPNAVALNSFMDSLCKHRRTKEARDIFDSMAAKGQKPDIFSYSTMLNGYVKEGCFDDMTGLFNLMLQNGVVRNHHIFNILINAYAKRGLMDEAMHMFEVMRQQGVNPDVFSYQIVMDSLCKMGRMDAALDKFNQMVNQGVSPNIVVYRCLVLGSCSHGDFVKAKELISEAVNRGLCSNSVFFYPVINNLSKEGKVKEAQDMFDFIVGIGQRPDVIMYHSLMDGYCLVGKVEEALRVLDAMKFAGLQPTAVTYAILLNGYCKSGRIAAGLSLFMEMSLSGVKPTTIMYNIILDGLFRSGRTVSAKEKFRTMSESGIPVGIDTYNIVLSGLCKNNCAGEAIELFKKLRAMNVKIDVKTLTIMISAMFKSRRIEEAKELFATISAIGLVPSVVTYSVMMTNFIKEGSLAEADDMFLAMEKASCAPNSILLNQVVRALLEKGVVVKAATYLAKLDAKQLSLEASTVSLILSLFSRKGKLREHVKLLPVKYQPPEMLD

SEQ ID NO: 302 - protein, 824 aa, Triticum aestivum
MSRLRHSTSTAPVPHLRLLRCRSSSISTLPPSRSSSPHAAFAAATERVSAGTLSPEDAHRLFDELLRQATPVPARSLNGFLTALSRAPDTGACRDGPALALSLFNRTRREAAGSRVVSSTIFTYGILMNCCCRTRRPELGLAFFGRVLRMGLKTNVVVATTVLQCLCGAKRTDEAVDILLHRMSELGCVPDDFSYNIVLKSLCDDSRSQRALDLLRMWENERGVCSPNVYTYNTVIHGFFKEGEVSKACNLFHEMAQKGVPPNVVTYSLTIDALCKARAMDKAQLFLRQMIHKGVRPNIVTYNVMIHGYSTLGQWKEAGKMFREMTGQGLIPDIVTWTSFMASLCKHGRTKEAAEFFDSMTAKGHKPDLVMYHVLLHGYATEGCFADMINLFNSMATKGIVPDRQVFNILIDAHAKHGMMDEAMHIFTGMQGQGVCPDVWTYSTLISALCRMGRLADAMDNFSQMIGKGVQPNTVVYHSLIQGFSTHGDLRKANELVYEMTNKGIPCPNIAFFSSIMDSLCKEGRVMDAHDIFHLVTDIGLKPNIITFNTLIDGHCLVGEMEKAFGVLDSMVSAGIEADVFTYNTLAYGYCRCGRIDDGLILFREMLQNKPKPTTITYNIILDGLFRAGRTFAAKKMFVEMIETGITVSISTYSIILGGLCRNNCSDEAITLFQKLGAMNVKFDIKILNTMINAMFKVRRREEANGLFAAISASGMVPNTSTYSVMIGNLLKEGSVEEAENMFSLMEKSGCAPDSRLINNIIRILLENGDIVKAGNYMSKVDGKSISLEASTTSLLMCLFSSKGKYREQISLLPVNYQFFNGVG

SEQ ID NO: 303 - protein, 221 aa, Triticum aestivum
MPRFSSTTPLSPLRRRLHHSSSTSHSSRSWEPHAAFAAATERARSGNLTLEDAHHLFDELLRQGNPVQDRPLNKLLSALARAPASAACRNGPALAVALFSRISQGARRRVAEPTVCTYGILMDCCCRAHRLDLALAFFGHLLKTGLEVDQVVFNTLLKGLCHAKRADEALDVLLHRMTELGCTPNVVAYNTIIHGFFKEGQVSKACNLFHEMAQQAFRLMW

SEQ ID NO: 304 - protein, 548 aa, Triticum aestivum
MDKAEVVLRQMIDRSVGPNSVTYSSLIHGYSSSGHWKEAVRVFKEMTSRRVTPNVHTYNMFITFLCKHGRSKEAAGIFDSMAMKGLKPDDVSYAILLHGYATEGSLVDMINLFNSMERDCILPDCRIFSILINAYAKSGKVDKVMLIFKKMQKQGVSPDAVTYSTLIDAFCKKGRLDDAMIKFNQMVDTGVRQGTAVYGSLIQGFCTHGDLVKGKELVTEMMNKGIPPPDIKFFHSIMQNLCTEGRVIEARDILGLIAHIGMRPNVCTFNILIGGYCLVRKMEGASKIFHDMMSYGLEPSNITYGILINGYCKNLRIDDGLILFKEMLRKGLKPTTLNYNIILDGLFLAGRTAAAKERFHEMVESGAHVCIDTYCIVLGGLCRNNCSSEAITLFGKLSAMNVRFDITIVNIIIGAFYRVERNQEAKDLFAAMPANCLVPNAVTYTIMMTNLIKEGSVEEADNLFLSMEKSGCTANSCLLNHVIRRLLEKGEIVKAGNYMYKVDAKNYSLEAKTVSLLMSLFTRKGKYREHIKLLPAKYQFLEEAATVE

SEQ ID NO: 305 - protein, 784 aa, Triticum aestivum
MPRFSSTTPLSPLRRRLRHSSSTSHSSRSWEPHAAFAAATERARSGNLTLEDAHHLFDELLRQGNPVQDRPLNKLLSALARAPASAACRNGPALAVALFSRISQGARRRVAEPTVCTYGILMDCCCRAHRLDLALAFFGHLLKTGLEVDQVVFNTLLKGLCHAKRADEALDVLLHRMTELGCTPNVVAYNTIIHGFFKEGQVSKACNLFHEMAQQGVPPNVVTYNSVIDALCKARAMDKAEVVLRQMIDRSVGPNSVTYSSLIHGYSSSGHWKEAVRVFKEMTSRRVTPNVHTYNMFITFLCKHGRSKEAAGIFDSMAMKGLKPDDVSYAILLHGYATEGSLVDMINLFNSMERDCILPDCRIFSILINAYAKSGKVDKVMLIFKKMQKQGVSPDAVTYSTLIDAFCKKGRLDDAMIKFNQMVDTGVRQGTAVYGSLIQGFCTHGDLVKGKELVTEMMNKGIPPPDIKFFHSIMQNLCTEGRVIEARDILGLIAHIGMRPNVCTFNILIGGYCLVRKMEGASKIFHDMMSYGLEPSNITYGILINGYCKNLRIDDGLILFKEMLRKGLKPTTLNYNIILDGLFLAGRTAAAKERFHEMVESGAHVCIDTYCIVLGGLCRNNCSSEAITLFGKLSAMNVRFDITIVNIIIGAFYRVERNQEAKDLFAAMPANCLVPNAVTYTIMMTNLIKEGSVEEADNLFLSMEKSGCTANSCLLNHVIRRLLEKGEIVKAGNYMYKVDAKNYSLEAKTVSLLMSLFTRKGKYREHIKLLPAKYQFLEEAATVE

SEQ ID NO: 306 - protein, 778 aa, Triticum aestivum
MPTGRLSSIFTSNATSSFRAPSPQPRAPLAALAAATERVCDGTLRPEEAHHLFDELLSQAAAVPERGLNNFLAALAHAPPSSTCSDGPGLAIALFNRMSRGAGARVVSPTLCTYSILMDCCCRAGRPDLVVAFFGRLLRLGLCLNVISFNNLLKGLCQVKRTNEAVDLLLHRTPELDCVPNVFSYSIVINGCFKQGEVDKACNLFHQMIQLGVQPNLVIYNSIIDALSKSGAMDKAEVVLRQMVDQGIEPNIRTYTSLIHGYSASGQWKAAARVFKEMVSVGVLPDAVAWNSFMDSLCKHRRTKDARVIFDSMAAKGQKPNIVSYSIMLNGYAKEGYFDDMTGLFNLMLQNGIVPNHHVFNILINAYSKRGLMDEAMHMFEVMRQQGVNPDVFGYQIVMDSLCKMGRVDAALDKFNQMVNQGVSPNKAVYQCLVLGSCSNGDFVKAKELISEAVNRGLCSNSVFFYPVINNLSKEGKVKDAQDMFDFIVGIGRPPDVIMYNSLMDGYCLVGKVEEALRVLDAMKSAGLQPDAFTYGILLNGYCKIGRIADGLSLFREMSLSGVKPTAIMYNIILDGLFRSGRAVSAKEKFCTMSESGIPVGIGTYNIVLHGLCRNNCTDEAIELFNKLRAMKLKINVITINTMISAMFKTRRIEEAKDLFATISAIGLVPSVVTYSVMMTNFIKEGLLAEADDMFLAMEKAGCAPDSRLLNHVVRVLLENGAVVKAATYLAKLDANHLSLEVSTISLIVSLFSGEGKLREHVELLPVKYQPPESSADN

SEQ ID NO: 307 - protein, 778 aa, Triticum aestivum; identical to SEQ ID NO: 306

SEQ ID NO: 308 - protein, 778 aa, Triticum aestivum; identical to SEQ ID NO: 306

SEQ ID NO: 309 - protein, 778 aa, Triticum aestivum; identical to SEQ ID NO: 306

SEQ ID NO: 310 - protein, 778 aa, Triticum aestivum; identical to SEQ ID NO: 306

SEQ ID NO: 311 - protein, 778 aa, Triticum aestivum; identical to SEQ ID NO: 306

SEQ ID NO: 312 - protein, 770 aa, Triticum aestivum
MPTARLSSISTSSFRAPSRAPLAALAAATERVRAGTLSREDAHHLFDELQGQAAAVPVRTLNNFLAALARAPPSSACSDGPGLAIALFNRMSRGAGARVVSPTLCTYSILMDCCCRAGRPDLVVAFFCRLLRLGLRFEEVISFNNLLKGLCQAKRSNEALDLLLHRMPELDCAPDVFSFNIVINGCLKEGEVDKACNLFHEMPQLGVQPDVVTYNSIIDALSKSGAMDKAEVLLRQMVDQGIEPNIRTYSCLIHGYSTFGQWKEALRVFKEMASLGVVPDVVTLSSLIDSLCKHRRTKQAREIFDSMAAKGLKPDIVSYSTMLNGYVKEGSFEDMTDLFNSMVRNGIVPNHHIFNILINAYAKRGLMDEAMHMFEVMRQQGVNPNVIDYLVIMDSLCKMGRMDAALEKFNQMVNQGVSPNKAVYQCLVLGSCSHGHFVKAKELISEAINRGLFSNSVFFYPVINDLCKEGKVKEAHDMFDFIVGIGQRPDVIMYNSLMDGYCLVGKVEEALRLLDAMKSAGLQPTGVTYAILLNGYCKIGRIADGLSLFREMSLSGVKPTTIMYNIILDGLFCSGRTVSAKEEFDTMSESGIPVNVRTYNIVLSGLCRNNCTGEAIELFKKLRAMNVKINVITLNTMISAMFKTRRIEEAKDLFATISAIGLVPSVVTYSVMMTNFIKEGLLAEADDMFLAMEKAGCAPNSSLLNQVVRVLLEKGAAVQAATYLAKLDAKQLSLEASTVSLILSLFSRKGKLREHVKLLPVKYQPPEMLD

SEQ ID NO: 313 - protein, 681 aa, Triticum aestivum
MSRGAGARVVSPTLCTYSILMDCCCRAGRPDLVVAFFGRLIRLGLRLEIISFSNLLKGLCQAKRSNEALDMLLHRMPELDCAPDVFSFNIVINGCFKEGEVDKACNLFHEMPQLGVQPDVVTYNSIIDALSKSRAMDKAEVVLRQMVDQGIEPNIRTYTSLIHGYSTSGQWKAAVRIFKEMASAGVRPNSVTLNSFIDSLCKHRKTKEARDIFDSMAAKGHKPDIFSYSTMLNGYAKEGCFDDMTDLFNSMVRNGIVPDHHVFNILINAYAKRGLMDKAMHMFEVMRQQGVNPNVVDYLVVMDSLCKMGKMAAAMDIFNQMVNQGVSPNIVVYRCMVLGSCSHGDFVKAKELISEAVNKGLCSNSVFFYPVINNLCKEGKVMEAQDMFDFDFIVGIGQRPDVIMYTSLMDGYCLVGKVEKALRVLDAMKSAGLQPTAVTYGALLNGYCKIGKIADGLSLFREMSLSGVKPTTIMYNIILDGLFCSGRPVSAKEEFDTMIESGIPVGVDTYNIVLSGLCKNNCTDEAMDLFKKLRATNMKIDVITLNIMISAMFKTRRIEEAKDLFATISAIGLVPCVVTYNLMMTNFIKEGLLPEADDMFLAMEKANCAPNSRLLNHVVRLLLEKGAVVKAATYLAKLDANHLSLEVSTISLIVSLFSGEGKLREHVELLPVKYQPPEMSI

SEQ ID NO: 314 - protein, 778 aa, Triticum aestivum
  misc_feature (433)..(433): Xaa can be any naturally occurring amino acid
MPTGRLSSIFTSNATSSFRAPSPQPRPPLAALAAATERVRAGTLSREEAHHLFDELQGQAAAVPERGLNNFLAALARAPPSSACGDGPALAVALFNRMSRGAGARVVSPTLCTYSILMDCCCRAGRPDLVVAFFGRLIRLGLRLEIISFSNLLKGLCQAKRSNEALDMLLHRMPELDCAPDVFSFNIVINGCFKEGEVDKACNLFHEMPQLGVQPDVVTYNSIIDALSKSRAMDKAEVVLRQMVDQGIEPNIRTYTSLIHGYSTSGQWKAAVRIFKEMASAGVRPNSVTLNSFIDSLCKHRKTKEARDIFDSMAAKGHKPDIFSYSTMLNGYAKEGCFDDMTDLFNSMVRNGIVPDHHVFNILINAYAKRGLMDKAMHMFEVMRQQGVNPNVVDYLVVMDSLCKMGKMAAAMDIFNQMVNQGVSPNIVVYRCXVLGSCSHGDFVKAKELISEAVNKGLCSNSVFFYPVINNLCKEGKVMEAQDMFDFDFIVGIGQRPDVIMYTSLMDGYCLVGKVEKALRVLDAMKSAGLQPTAVTYGALLNGYCKIGKIADGLSLFREMSLSGVKPTTIMYNIILDGLFCSGRPVSAKEEFDTMIESGIPVGVDTYNIVLSGLCKNNCTDEAMDLFKKLRATNMKIDVITLNIMISAMFKTRRIEEAKDLFATISAIGLVPCVVTYNLMMTNFIKEGLLPEADDMFLAMEKANCAPNSRLLNHVVRLLLEKGAVVKAATYLAKLDANHLSLEVSTISLIVSLFSGEGKLREHVELLPVKYQPPEMSI

SEQ ID NO: 315 - protein, 222 aa, Triticum aestivum
MLHKGLKPTTFNYNVILDGLFLARQTVASKVKFHEMAESGVSVCIDTYSIVLGGLCRNNCIGEAITLFQKLSTMNVKFNIAIVNIMIGAFFRVRRNQEAKDLFAAVSANGLVANVFTYTVMMINLIEEGSLEEADTLFLSMKKSGCTANSCMLNHIIRRLLERGEIVKAGNYMSKVDAKSYSLEAKTVLLLISLFSGNGKYREHIKLLPMKYQFLEEAATVE

SEQ ID NO: 316 - protein, 328 aa, Triticum aestivum
MMKKGMLPPDIMFFSSIMQNLCTEGRVIEARDILDLIVCIGMRPDVFIFNILIGGYCLVRKMADASKIFDDMVSYGLEPCNITYGILINGYCKNGRIDDGLILFKEMLHKGLKPTTFNYNVILDGLFLARQTVASKVKFHEMAESGVSVCIDTYSIVLGGLCRNNCIGEAITLFQKLSTMNVKFNIAIVNIMIGAFFRVRRNQEAKDLFAAVSANGLVANVFTYTVMMINLIEEGSLEEADTLFLSMKKSGCTANSCMLNHIIRRLLERGEIVKAGNYMSKVDAKSYSLEAKTVLLLISLFSGNGKYREHIKLLPMKYQFLEEAATVE

SEQ ID NO: 317 - protein, 487 aa, Triticum aestivum
  misc_feature (16)..(16): Xaa can be any naturally occurring amino acid
  misc_feature (18)..(25): Xaa can be any naturally occurring amino acid
  misc_feature (27)..(28): Xaa can be any naturally occurring amino acid
MRIVLKSAEKDFVLSXLXXXXXXXXCXXHTKAMPRFSSSTPMSPPRLRLLLLLRLGARHSSSTSHPSRIWDPHAAFAAATQRARSGTLTTEDAHHLFEELLRQGNPVQERPLTNFLAALARAPASPFCSDGPALAVALFSRLSRGAGRRVAQPNVFTYGVLMDCCCRARRLDVAIAFFAHLLKTGLEAGQVVFGTLLKGLCHAKHSDEALDVVLHRMPELGCTPDVVAYTTVIHGFLKEGQVGKACNLFHGMAQQGVAPDVVTYSSVIDALCKARAMDKAEYFLREMVDNGVVPNNVTYNSLIHGYSSLGHQKEAVRVLKEMTRQGIIPDVFTCNSVMASLCKNGKSKEAAKMFDSMSMKGLKPNTVSYVILLHGYATEGCLVDMINLFNSMATDCILPNCHIFNILIYAYAKSGKLDKAMLIFKEMQKQGVSPDAVTYSTVIHAFCKKGRLDDAVIKFNQMIDTGVRPDASVYRSLIQGESKGICY

SEQ ID NO: 318 - protein, 328 aa, Triticum aestivum; identical to SEQ ID NO: 316

SEQ ID NO: 319 - protein, 792 aa, Triticum aestivum
MPRFSSSTPMSPPRLRLLLLLRLGARHSSSTSHPSRIWDPHAAFAAATQRARSGTLTTEDAHHLFEELLRQGNPVQERPLTNFLAALARAPASPFCSDGPALAVALFSRLSRGAGRRVAQPNVFTYGVLMDCCCRARRLDLAIAFFAHLLKTGLEAGQVVFGTLLKGLCHAKHSDEALDVVLHRMPELGCTPDVVAYTTVIHGFLKEGQVGKACNLFHGMAQQGVAPDVVTYSSVIDALCKARAIDKAEYFLREMVDNGVVPNNVTYNSLIHGYSSLGHQKEAVRVLKEMTRQGIIPDVFTCNSVMASLCKNGKSKEAAKMFDSMSMKGLKPNTVSYVILLHGYATEGCLVDMINLFNSMATDCILPNCHIFNILIYAYAKSGKLDKAMLIFKEMQKQGVSPDAVTYSTVIHAFCKKGRLDDAVIKFNQMIDTGVRPDASVYRSLIQGFCTHGDLVKAKEYVTEMMKKGMLPPDIMFFSSIMQNLCTEGRVIEARDILDLIVCIGMRPDVFIFNILIGGYCLVRKMADASKIFDDMVSYGLEPCNITYGILINGYCKNGRIDDGLILFKEMLHKGLKPTTFNYNVILDGLFLARQTVAAKVKFHEMAESGVSVCIDTYSIVLGGLCRNNCIGEAITLFQKLSTMNVKFNIAIVNIMIGAFFRVRRNQEAKDLFAAVSANGLVANVFTYTVMMINLIEEGSLEEADTLFLSMKKSGCTANSCMLNHIIRRLLERGEIVKAGNYMSKVDAKSYSLEAKTVLLLISLFSGNGKYREHIKLLPMKYQFLEEAATVE

SEQ ID NO: 320 - protein, 455 aa, Triticum aestivum
  misc_feature (11)..(11): Xaa can be any naturally occurring amino acid
MPRFSSSTPMXPPRLRLLLLLRLGARHSSSTSHPSRIWDPHAAFAAATQRARSGTLTTEDAHHLFEELLRQGNPVQERPLTNFLAALARAPASPFCSDGPALAVALFSRLSRGAGRRVAQPNVFTYGVLMDCCCRARRLDLAIAFFAHLLKTGLEAGQVVFGTLLKGLCHAKHSDEALDVVLHRMPELGCTPDVVAYTTVIHGFLKEGQVGKACNLFHGMAQQGVAPDVVTYSSVIDALCKARAIDKAEYFLREMVDNGVVPNNVTYNSLIHGYSSLGHQKEAVRVLKEMTRQGIIPDVFTCNSVMASLCKNGKSKEAAKMFDSMSMKGLKPNTVSYVILLHGYATEGCLVDMINLFNSMATDCILPNCHIFNILIYAYAKSGKLDKAMLIFKEMQKQGVSPDAVTYSTVIHAFCKKGRLDDAVIKFNQMIDTGVRPDASVYRSLIQGESKGICY

SEQ ID NO: 321 - protein, 792 aa, Triticum aestivum
MPRFSSSTPMSPPRLRLLLLLRLGARHSSSTSHPSRIWDPHAAFAAATQRARSGTLTTEDAHHLFEELLRQGNPVQERPLTNFLAALARAPASPFCSDGPALAVALFSRLSRGAGRRVAQPNVFTYGVLMDCCCRARRLDVAIAFFAHLLKTGLEAGQVVFGTLLKGLCHAKHSDEALDVVLHRMPELGCTPDVVAYTTVIHGFLKEGQVGKACNLFHGMAQQGVAPDVVTYSSVIDALCKARAMDKAEYFLREMVDNGVVPNNVTYNSLIHGYSSLGHQKEAVRVLKEMTRQGIIPDVFTCNSVMASLCKNGKSKEAAKMFDSMSMKGLKPNTVSYVILLHGYATEGCLVDMINLFNSMATDCILPNCHIFNILIYAYAKSGKLDKAMLIFKEMQKQGVSPDAVTYSTVIHAFCKKGRLDDAVIKFNQMIDTGVRPDASVYRSLIQGFCTHGDLVKAKEYVTEMMKKGMLPPDIMFFSSIMQNLCTEGRVIEARDILDLIVCIGMRPDVFIFNILIGGYCLVRKMADASKIFDDMVSYGLEPCNITYGILINGYCKNGRIDDGLILFKEMLHKGLKPTTFNYNVILDGLFLARQTVAAKVKFHEMAESGVSVCIDTYSIVLGGLCRNNCIGEAITLFQKLSTMNVKFNIAIVNIMIGAFFRVRRNQEAKDLFAAVSANGLVANVFTYTVMMINLIEEGSLEEADTLFLSMKKSGCTANSCMLNHIIRRLLERGEIVKAGNYMSKVDAKSYSLEAKTVLLLISLFSGNGKYREHIKLLPMKYQFLEEAATVE

SEQ ID NO: 322 - protein, 181 aa, Triticum aestivum
MPTGRLSSIFTSNATSSFRAPSPQPRAPLAALAATTERVCAGTLRPEEAHHLFDELLSQAAAVPERGLNNFLAALARAPPSAACSDGPGLAITLFNRMSRGAGAQVVSPTLCTYSILMDCCCRAGRPDLVVAFFGRLLRSSPSTTSSRGSARSSVQMRLWTCCSTGHLNWTVCLMSSRTAS

SEQ ID NO: 323 - protein, 365 aa, Triticum aestivum
MPTGRLSSIFTSNATSSFRAPSPQPRAPLAALAATTERVCAGTLRPEEAHHLFDELLSQAAAVPERGLNNFLAALARAPPSAACSDGPGLAITLFNRMSRGAGAQVVSPTLCTYSILMDCCCRAGRPDLVVAFFGRLLRLGLHLNVISFNNLLKGLCQVKRTNEAVDLLLHRTPELDCVPNVFSYSIVINGCFKEGEVDKACNLFHEMPQLGVQPNVVIYTSIIDALSKCGAMDKAEVVLQQMVDQGIEPNIRTYTSLIHGYSASGQWKAAARVFKEMVSAGVLPNAVTLNSFMDSLCKHRRTKEKGNLVHVAPTCAGSREGSDHFGSIVRSLSLHFCKRLFPGLEPMTSWSQGSSFTTAPRLPS

SEQ ID NO: 324 - protein, 272 aa, Triticum aestivum
MDIELVGKVEEALRVLDAMKSAGLQPTAVTYAILLNGYCKIGRIADGLSLFREMSLSGVKPTTFMYNIILDGLFRSGRAVSAKEKFRTMSESGIPVGIVTYNIVLHGFCRNNCTDEAIELFKKLRGMNVKIDVITLTTMISAMFKTRRIEEAKDLFATISAIGLVPSVVTYSVMMTNFIKEGLLAEADDMFLAMEKAGCAPDSRLLNHVVRVLLENGAVVKAATYLAKLDAKQLSLEASTVSLILSLFSRKGKLREHVKLLPVKYQPPEMLD

SEQ ID NO: 325 - protein, 181 aa, Triticum aestivum; identical to SEQ ID NO: 322

SEQ ID NO: 326 - protein, 507 aa, Triticum aestivum
MPTGRLSSIFTSNATSSFRAPSPQPRAPLAALAATTERVCAGTLRPEEAHHLFDELLSQAAAVPERGLNNFLAALARAPPSAACSDGPGLAITLFNRMSRGAGAQVVSPTLCTYSILMDCCCRAGRPDLVVAFFGRLLRLGLRLNVISFNNLLKGLCQVKRTNEAVDLLLHRTPELDCVPNVFSYSIVINGCFKEGEVDKACNLFHEMPQLGVQPNVVIYTSIIDALSKCGAMDKAEVVLQQMVDQGIEPNIRTYTSLIHGYSASGQWKAAARVFKEMVSVGVLPNAVTLNSFMDSLCKHRRTKDARDIFDSMAAKGQKPDIFSYSIMLNGYAKEGYFEDMTDLFNLMVLNGIVPNHHIFNILINAYAKRGLMDEAMHMFEVMRQQGVNPNVVDYVVVMDSLCKMGRMDAALDKFTQLVNQGVSPNKAVYQCLVLGSCSHGHFVKAKELISEAINRGLFSNSVFFYPVINDLCKEGKVKEAQDMFDFILGIGRRPDVIMYNSLMDGY

SEQ ID NO: 327 - protein, 776 aa, Triticum aestivum
MPTGRLSSIFTSNATSSFRAPSPQPRAPLAALAATTERVCAGTLRPEEAHHLFDELLSQAAAVPERGLNNFLAALARAPPSAACSDGPGLAITLFNRMSRGAGAQVVSPTLCTYSILMDCCCRAGRPDLVVAFFGRLLRLGLRLNVISFNNLLKGLCQVKRTNEAVDLLLHRTPELDCVPNVFSYSIVINGCFKEGEVDKACNLFHEMPQLGVQPNVVIYTSIIDALSKCVAMDKAEVVLQQMVDQGIEPNIRTYTSLIHGYSASGQWKAAARVFKEMVSVGVLPNAVTLNSFMDSLCKHRRTKDARDIFDSMAAKGQKPDIFSYSIMLNGYAKEGYFEDMTDLFNLMVLNGIVPNHHIFNILINAYAKRGLMDEAMHMFEVMRQQGVNPNVVDYVVVMDSLCKMGRMDAALDKFTQMVNQGVSPNKAVYQCLVLGSCSHGHFVKAKELISEAINRGLFSNSVFFYPVINDLCKEGKVKEAQDMFDFILGIGRRPDMIMYNSLMDGYCLVGKVEEALRVLDAMKSAGLQPTAVTYAILLNGYCKIGRIADGLSLFREMSLSGVKPTTFMYNIILDGLFRSGRAVSAKEKFRTMSESGIPVGIVTYNIVLHGFCRNNCTDEAIELFKKLRGMNVKIDVITLTTMISAMFKTRRIEEAKDLFATISAIGLVPSVVTYSVMMTNFIKEGLLAEADDMFLAMEKAGCAPDSRLLNHVVRVLLENGAVVKAATYLAKLDAKQLSLEASTVSLILSLFSRKGKLREHVKLLPVKYQPPEMLD

SEQ ID NO: 328 - protein, 507 aa, Triticum aestivum
MPTGRLSSIFTSNATSSFRAPSPQPRAPLAALAATTERVCAGTLRPEEAHHLFDELLSQAAAVPERGLNNFLAALARAPPSAACSDGPGLAITLFNRMSRGAGAQVVSPTLCTYSILMDCCCRAGRPDLVVAFFGRLLRLGLRLNVISFNNLLKGLCQVKRTNEAVDLLLHRTPELDCVPNVFSYSIVINGCFKEGEVDKACNLFHEMPQLGVQPNVVIYTSIIDALSKCGAMDKAEVVLQQMVDQGIEPNIRTYTSLIHGYSASGQWKAAARVFKEMVSVGVLPNAVTLNSFMDSLCKHRRTKDARDIFDSMAAKGQKPDIFSYSIMLNGYAKEGYFEDMTDLFNLMVLNGIVPNHHIFNILINAYAKRGLMDEAMHMFEVMRQQGVNPNVVDYVVVMDSLCKMGRMDAALDKFTQMVNQGVSPNKAVYQCLVLGSCSHGHFVKAKELISEAINRGLFSNSVFFYPVINDLCKEGKVKEAQDMFDFILGIGRRPDVIMYNSLMDGY

SEQ ID NO: 329 - protein, 272 aa, Triticum aestivum
MDIELVGKVEEALRVLDAMKSAGLQPTAVTYAILLNGYCKIGRIADGLSLFREMSLSGVKPTTFMYNIILDGLFRSGRAVSAKEKFRTMSESGIPVGIVTYNIVLHGFCRNNCTDEAIELFKKLRGMNVKIDVITLTTMISAMFKTRRIEEAKDLFATISAIGLVPSVVTYSVMMTNFIKEGLLAEADDMFLAMEKAGCAPDSRLLNHVVRVLLENGAVVKAATYLAKLDAKQLSLEASTVSLILSLFSRKGKLREHVKLLPVKYQPPKMLD

SEQ ID NO: 330 - protein, 507 aa, Triticum aestivum; identical to SEQ ID NO: 326

SEQ ID NO: 331 - protein, 272 aa, Triticum aestivum
MDIELVGKVEEALRVLDAMKSAGLQPTAVTYAILLNGYCKIGRIADGLSLFREMSLSGVKPTTFMYNIILDGLFRSGRAVSAKEKFRTMSESGIPVGIVTYNIVLHGFCRNNCTDEAIELFKKLRGMNVKIDVITLTTMISAMFKTRRIEEAKDLFATISAIGLLPSVVTYSVMMTNFIKEGLLAEADDMFLAMEKAGCAPDSRLLNHVVRVLLENGAVVKAATYLAKLDAKQLSLEASTVSLILSLFSRKGKLREHVKLLPVKYQPPEMLD

SEQ ID NO: 332 - protein, 272 aa, Triticum aestivum; identical to SEQ ID NO: 324

SEQ ID NO: 333 - protein, 771 aa, Triticum aestivum
MPAARLSSISTSSFRAPSRAPLAALAAATERVRAGTLSQEDAHHLFDELLGQAAAVPERGLNNFLAALARAPPSAACRDGPGLAIALFNHMSRGAGARVVSPTLCTYSILMDCCCRAGRPDLVVAFFGRLIRLGLRLEVISFSNLLKGLCQAKRTNEAVDLLLHRTPELDCVPNVFSYNIVISSCFKEGEVDKACNLFHEMPQLGVQPNVVIYTSIIDALSKCGAMDKAEVVLQQMVDQGIEPDIRTYTSLIHGYSASGQWKAAVRVFKEMVSVGVLPNAVTLNSFMDSLCKHRRTKEAREIFDSMAAKGLKPNIVSYSTMLNGYVKEGSFEDMTDLFNSMVRNGIVPNHHIFNILINAYAKRGLMDEAMHMFEVMRQQGVNPDVFDYQIIMDSLCKMGRMDAALDKFNQMVNQGVSPNKAVYQCLVLGSCSHGDFVKAKELISEAVNRGLCSNSVFFYPVINDLCKEGKVKEAQDMFDFILGIGQRPDVIMYTSLMDGYCLVGKVEKALSVLDAMKSAGLQPDDVVYATLLNGYCKIGRIADGLSLFREMSLSGVKPTTIIYNIILDGLFCSGRTGSAKEKFHTMTESGIPVGVDTYNIVLSGLCRNNCTDEAIELFKKLRATNVKIDIMTLNIMISAMFKTRRIEEAKDLFATISAIGLVPSVVTYSLMMTNFIKEGLLADADDTFLVMEKAGCAPNSSLLNQVVRVLLEKGAFVKAATYLAKLDAKQLSVEASTISLIVSLFSGEGKPREHVELLPVKYQPPQSSADN

SEQ ID NO: 334 - protein, 771 aa, Triticum aestivum
MPAARLSSIPTSSFRASSRAPLAALAVATERVRAGTLSREDAHHLFDELLGQAAAVPERGLNNFLAALARAPPSAACRDGPGLAIALFNRMSRGTGARVVSPTLCTYSILMDCCCRAGRPDLVVAFFGRLLRLGLRLDVISLSNLLKGLCQAKRSNEALDLLLHRMPELHCAPGVFSYNIVINGCLKEGEVDKACNLFHEMPQLGVQPDVVTYTSIMDALSKSGAMDKAEVLLRQMVDQGIEPNIRTYSCLIHGYSTFGQWKEALRVFKEMATLGVVPDVVTLSSLIDSLCKHRRTKEAREIFDSMAAKGLKPNIVSYSTMLNGYVKEGSFEDMTDLFNSMVRNGIVPDHHIFNIQINAYAKRGLMDEAMHMFEVMRQQGVNPDVFDYQIIMDSLCKMGRMDAALDKFNQMVNQGVSPNKAVYQCLVLGSCSHGDFVKAKELISEAVNRGLCSNSVFFYPVINDLCKEGKVKEAQDMFDFILGIGQRPDVIMYTSLMDGYCLVGKVEKALSVLDAMKFAGLQPDDVVYGTLLNSYCKIGRIADGLSLFREMSLSGVKPTTIIYNIILDGLFCSGRTGSAKEKFHTMTESGIPVGVDTYNIVLSGLCRNNCTDEAIELFKKLRATNVKIDVMTLNIMISAMFKTRRIEEAKDLFATISAIGLVPSVVTYSLMMTNFIKEGLLADADDTFLVMEKAGCAPNSSLLNQVVRVLLEKGAVLKAATYLAKLDAKQLSVEVSTISLIVSLFSGEGKLREHVELLPVKYQPPQSSADN

SEQ ID NO: 335 - protein, 681 aa, Triticum aestivum
MSRGAGARVVSPTLCTYSILMDCCCRAGRPDLVLAFFGRLLRLGLRLDVISLSNLLKGLCQAKRSNEALDLLLHRMPELHCAPDVFSYNIVINGCLKEGEVDKACNLFHEMPQLGVQPDVVTYTSIMDALSKSGAMDKAEVLLRQMVDQGIEPNIRTYSCLIHGYSTFGQWKEALRVFKEMASLGVVPDVVTLSSLIDSLCRHRRTKQAREIFDSMAAKGLKPNIVSYSTMLKGYVKEGSFEDMTDLFNSMVRNGIVPDHHIFNIQINAYAKRGLMDEAMHMFEVMRQQGVNPDVFDYQIIMDSLCKMGRMDAALDKFNQMVNQGVSPNKAVYQCLVLGSCSHGDFVKAKELISEAVNRGLCSNSVFFYPVINDLCKEGKVKEAQDMFDFILGIGQRPDVIMYTSLMDGYCLVGKVEKALSVLDAMKFAGLQPDDVVYGTLLNGYCKIGRIADGLSLFREMSLSGVKPTTIIYNIILDGLFCSGRTGSAKEKFHTMTESGIPVGVDTYNIVLSGLCRNNCTDEAIELFKKLCATNVKIDVMTLNIMISAMFKTRRIEEAKDLFATISAIGLVPSVVTYSLMMTNFIKEGLLADADDTFLVMEKAGCAPNSSLLNQVVRVLLEKGAVLKAATYLAKLDAKQLSVEVSTISLIVSLFSGEGKLREHVELLPVKYQPPQSSADN

SEQ ID NO: 336 - protein, 681 aa, Triticum aestivum; identical to SEQ ID NO: 335

SEQ ID NO: 337 - protein, 771 aa, Triticum aestivum; identical to SEQ ID NO: 334

SEQ ID NO: 338 - protein, 519 aa, Triticum aestivum
  misc_feature (350)..(350): Xaa can be any naturally occurring amino acid
  misc_feature (509)..(509): Xaa can be any naturally occurring amino acid
  misc_feature (517)..(517): Xaa can be any naturally occurring amino acid
MPQLGVQPDVVTYTSIMDALSKSGAMDKAEVLLRQMVDQGIEPNIRTYSCLIHGYSTFGQWKEALRVFKEMASLGVVPDVVTLSSLIDSLCRHRRTKQAREIFDSMAAKGLKPNIVSYSTMLKGYVKEGSFEDMTDLFNSMVRNGIVPDHHIFNIQINAYAKRGLMDEAMHMFEVMRQQGVNPDVFGYQIIMDSLCKMGKMDAALDKFNQMVNQGVSPNKAVYQCLVLGSCSHGDFVKAKELISEAVNRGMCSNSVFFYPVINDLCKEGKVKEAQDMFDFILGIGQRPDVIMYTSLMDGYCLVGKVEKALSVLDAMKFAGLQPDDVVYGTLLNSYCKIGRIADGLSLFRXMSLSGVKPTTIIYNIILDGLFCSGRTGSAKEKFHTMTESGIPVGVDTYNIVLSGLCRNNCTDEAIELFKKLRATNVKIDVMTLNIMISAMFKTRRIEEAKDLFATISAIGLVPSVVTYSLMMTNFIKEGLLADADDTFLVMEKAGCAPNSSLLNQVVRXLLEKGAVXNE

SEQ ID NO: 339 - protein, 681 aa, Triticum aestivum; identical to SEQ ID NO: 335

SEQ ID NO: 340 - protein, 771 aa, Triticum aestivum
MPAARLSSIPTSSFRASSRAPLAALAVATERVRAGTLSREDAHHLFDELLGQAAAVPERGLNNFLAALARAPPSAACRDGPGLAIALFNRMSRGTGARVVSPTLCTYSILMDCCCRAGRPDLVLAFFGRLLRLGLRLDVISLSNLLKGLCQAKRSNEALDLLLHRMPELHCAPGVFSYNIVINGCLKEGEVDKACNLFHEMPQLGVQPDVVTYTSIMDALSKSGAMDKAEVLLRQMVDQGIEPNIRTYSCLIHGYSTFGQWKEALRVFKEMATLGVVPDVVTLSSLIDSLCKHRRTKEAREIFDSMAAKGLKPNIVSYSTMLNGYVKEGSFEDMTDLFNSMVRNGIVPDHHIFNIQINAYAKRGLMDEAMHMFEVMRQQGVNPDVFDYQIIMDSLCKMGRMDAALDKFNQMVNQGVSPNKAVYQCLVLGSCSHGDFVKAKELISEAVNRGLCSNSVFFYPVINDLCKEGKVKEAQDMFDFILGIGQRPDVIMYTSLMDGYCLVGKVEKALSVLDAMKFAGLQPDDVVYGTLLNSYCKIGRIADGLSLFREMSLSGVKPTTIIYNIILDGLFCSGRTGSAKEKFHTMTESGIPVGVDTYNIVLSGLCRNNCTDEAIELFKKLRATNVKIDVMTLNIMISAMFKTRRIEEAKDLFATISAIGLVPSVVTYSLMMTNFIKEGLLADADDTFLVMEKAGCAPNSSLLNQVVRVLLEKGAVLKAATYLAKLDAKQLSVEVSTISLIVSLFSGEGKLREHVELLPVKYQPPQSSADN

SEQ ID NO: 341 - protein, 787 aa, Triticum aestivum
MPRFSSSTPMSPPRLRLRLCARHSSSTSHPSRIWDPHAAFAAATQRAHSGNLTPEDAHHLFDELLRQGNPVQERPLNNFLATLARAPASASCSDGPALAVALFGRLSGGAGRRVAQPNVFTYGVLMDCCCRACRTDLALAFFGRLFRTGLEANQVIFCTLLKGLCHAKRTDEALDVLLHRMPELGCTPYVVAYNTVIHGFFREGQVGKACDLFHGMAQQGVMPDVVTYNSVIDALCKARAMDKAEYFLRQMVDNGVVPNTVTYNSLIHGYSSSGHWKEAVRVFKEMASQRVTADVHTYNMFMTFLCKHGRSKEAAGIFDTMAIKGLKPDNVSYAIRLHGYATEGCLVDMINLFNSMERDCILPDCRIFNILINAYAKSGKLDKAMLIFNEMQKQGVSPNAVTYSTVIDAFCKKGQLDDAMIKFNQMIDTGVPQGTAVYGSLIQGFCTHGNLVKAKELLTEMMNKGIPPPDIKFFHSIMQNLCTEGRVIEAHDVLGLIAHIGMRPNVCTFNILSGGYCLVGKMEDASKIFDDMMSYGLEPSNMTYGILINGYCKNERINDGLILFKEMLRKGLKPTTFNYNVILDGLFLTGRTVAAKEKFDEMVESGVSVCIDTYSIVLGGLCRNNCSGEAIMLFQKLSTMDVKFNITIVNIMIDAFYRVQRNQEAKDLFAAVSANGLVADVFTYTIMMKNLIKEGSVEEADDLFLSMEKSGCTADSYMLNLIVRMLLEKGELVKAGNYMSKVDAMSYSLEAETVSLLISLFSGKGKYREHIGLLPTKYRFHEEAATV

SEQ ID NO: 342 - protein, 787 aa, Triticum aestivum
MPRFSSSTPMSPPRLRLRLCARHSSSTSHPSRIWDPHAAFAAATQRARSGNLTPEDAHHLFDELLRQGNRVQERPLNNFLATLARAPASASCSDGPALAVALFGRLSGGAGRRVAQPNVFTYGVLMDCCCCACRTDLALAFFGRLLKTGLEADQVVFCTLLKGLCHAKRADEALDVLLHRMPELGCTPYVVAYNTVIHGFFREGQVGKACNLFHEMRQQGVTPDVVTYNTVIDALCKAKAMDKAEYFLGQMVDDGVVPDNVTYNSLIHGYSSSGHSKEAVRVLKEMTSKGIIPDVFTCNSLMASLCKNGRSKEAAEIFDSMSMKGLKPNTVSYAILLHGYAIEGCLVDMINLFNSMATDCILPNCHIFSILINAYAKSGKLDKAMLIFHEMQKQGVSPNAVTYSTVIDAFCKKGQLDDAMIKFNQMIDTGVRQGTAVYGSLIQGFCTHGDLVKAKELLTEMMNKGIPPPDIKFFHSIMQNLGTEGRVIEARDVLGLIAHIGMRPNVCTFNILIGGYCLVGKMEDASKIFDDMMSYGLEPSNITYGILINGYCKNERINDGLILFKEMLRKGLKPTTFNYNVILDGLFLTGRTVAAKEKFDEMVESGVSVCIDTYSIVLGGLCKNNCSGEAITLFQKLSTMDVKFNITIVNIMIDAFYRVQRNQEAKDLFAAVSANGLVANVFTYTIMMKNLIKEGSVEEADDLFLSMEKSGCTADSYMLNLIVRMLLEKGELVKAGNYMSKVDAMSYSLEAETVSLLISLFSGKGKYREHIGLLPTKYRFHEEAATV

SEQ ID NO: 343 - protein, 779 aa, Triticum aestivum
MSPPRLRLRLCARHSSSTSHPSRIWDPHAAFAAATERAHSGNLTPEDAHHLFDELLRQANPVQERPLNNLLAALARAPASAACSDGPALTVNLFSRISQGARRRVAHPTACTYGILMDCCCRAHRLDLAFAFFGCLLRTGLKAGVIQVCTLLKGLCRAKRADEALDMLLHRMPELGCTPNVVAYTTVIHGFFKEGQVGKACNLFHGMAQQGVMPDVVTYNSVIDALCKARAMDKAEYFLRQMVDNGVVPNNVTYNSLIHGYSSSGHWKEAVRVFKEMTSRRVTADVHTYNMFMTFLCKHGRSKEAAGIFDTMAMKGLKPDNVSYAIRLHGYATEGCLVDMINLFNSMERDCILPDCYIFNILINAYAKSGKLDKAMLIFNEMQKQGVSPNAVTYSTVIDAFCKKGQLDDAMIKFNQMIDTGVRQGTAVYRSLIQGFCTHSDLVKAKELLTEMMNKGIPPPDIKFFHSIMQNLCTEGRVIEARDILGLIAHIGMRPNVCTFNILIGGYCLVGKMEDASKIFDDMMSYGLEPCNITYGILINGYCKNRRIDDGLILFKEMLHKGLKPTTFNYNVILDGLFLVGRTVAAKEKFDEMVESGVCVCIDTYSIVLGGLCRNNCSGEAITLFQKLSTMEVKFNITIVNIMIDAFYKVQRNQEAKDLFAAVSANGLVADVFTYTRMMKNLIKEGSVEEADDLFLSMEKSGCTADSYMLNLIVRMFLGKGEIVKAGNYISKIDAKSYSLEAKTVSLLISLFSGKGKYREHIGLLPAKYRFREEAATVV

SEQ ID NO: 344 - protein, 779 aa, Triticum aestivum
MSPPRLRLRLCARHSSSTSHPSRIWDPHAAFAAATERAHSGNLTPEDAHHLFDELLRQANPVQERPLNNLLAALARAPASAACSDGPALTVNLFSRISQGARRRVAHPTACTYGILMDCCCRAHRLDLAFAFFGCLLRTGLKAGVIQVCTLLKGLCRAKRADEALDMLLHRMPELGCTPNVVAYTTVIHGFFKEGQVGKACNLFHGMAQQGVMPDVVTYNSVIDALCKARAMDKAEYFLRQMVDNGVVPNNVTYNSLIHGYSSSGHWKEAVRVFKEMTSRRVTADVHTYNMFMTFLCKHGRSKEAAGIFDTMAMKGLKPDSVSYAIRLHGYATEGCLVDMINLFNSMERDCILPDCRIFNILINAYAKSGKLDKAMLIFNEMQKQGVSPNAVTYSTVIDAFCKKGQLDDAMIKFNQMIDTGVRQGTAVYRSLIQGFCTHSDLVKAKELLTEMMNKGIPPPDIKFFHSIMQNLCTEGRVIEARDILGLIAHIGMRPNVCTFNILIGGYCLVGKMEDASKIFDDMMSYGLEPCNITYGILINGYCKNRRIDDGLILFKEMLHKGLKPTTFNYNVILDGLFLAGRTVAAKEKFDEMVESGVSVCIDTYSIVLGGLCRNNCSGEAITLFQKLSTMEVKFNITIVNIMIDAFYKVQRNQEAKDLFAAVSANGLVADVFTYTRMMKNLIKEGSVEEADDLFLSMEKSGCTADSYMLNLIVRMFLGKGEIVKAGNYISKIDAKSYSLEAKTVSLLISLFSGKGKYREHIGLLPAKYRFREEAATVV

SEQ ID NO: 345 - protein, 779 aa, Triticum aestivum
MSPPRLRLRLCARHSSSTSHPSRIWDPHAAFAAATERARSGNLTPEDAHHLFDELLRQANPVQERPLNNLLAALARAPASAACSDGPALTVNLFSRISQGARRRVAHPTACTYGILMDCCCRAHRLDLAFAFFGCLLRTGLKAGVIQVCTLLKGLCRAKRADEALDMLLHRMPELGCTPNVVAYTTVIHGFFKEGQVGKACNLFHGMAQQGVMPDVVTYNSVIDALCKARAMDKAEYFLRQMVDNGVVPNNVTYNSLIHGYSSSGHWKEAVRVFKEMTSRRVTADVHTYNMFMTFLCKHGRSKEAAGIFDTMAMKGLKPDSVSYAIRLHGYATKGCLVDMINLFNSMERDCILPDCRIFNILINAYAKSGKLDKAMLIFNEMQKQGVSPNAVTYSTVIDAFCKKGQLDDAMIKFNQMIDTGVRQGTAVYRSLIQGFCTHSDLVKAKELLTEMMNKGIPPPDIKFFHSIMQNLCTEGRVIEARDILGLIAHIGMRPNVCTFNILIGGYCLVGKMEDASKIFDDMMSYGLEPCNITYGILINGYCKNRRIDDGLILFKEMLHKGLKPTTFNYNVILDGLFLAGRTVAAKEKFDEMVESGVSVCIDTYSIVLGGLCRNNCSGEAITLFQKLSTMEVKFNITIVNIMIDAFYKVQRNQEAKDLFAAVSANGLVADVFTYTRMMKNLIKEGSVEEADDLFLSMEKSGCTADSYMLNLIVRMFLGKGEIVKAGNYISKIDAKSYSLEAKTVSLLISLFSGKGKYREHIGLLPAKYRFREEAATVV

SEQ ID NO: 346 - protein, 230 aa, Triticum aestivum
  misc_feature (171)..(171): Xaa can be any naturally occurring amino acid
  misc_feature (197)..(197): Xaa can be any naturally occurring amino acid
  misc_feature (201)..(201): Xaa can be any naturally occurring amino acid
  misc_feature (204)..(204): Xaa can be any naturally occurring amino acid
MDKFNEMTDMGFQPDTTVYHSLIQGFCMHGDLVKAKGLVSEMMNKGIPRPDIAFFNSIINTLCKEGGVMDAQDVFDLVTAIDERPNIITFNSLIDGYCLVGEMDKAFGVLDAMKSVGAEPDIVTYNTLVNGYCRNGRIDDGLTLFREMPHKRIKPDTVTYGIILDGLFHAXRTVVARKMFHEMIESETTVDIPVYNXILKXLFXCITYNLSSLKSSRKQCFDILSARFHK

SEQ ID NO: 347 - protein, 321 aa, Triticum aestivum
MDKFNEMTDMGFQPDTTVYHSLIQGFCMHGDLVKAKGLVSEMMNKGIPRPDIAFFNSIINTLCKEGGVMDAQDVFDLVTAIDERPNIITFNSLIDGYCLVGEMDKAFGVLDAMKSVGAEPDIVTYNTLVNGYCRNGRIDDGLTLFREMPHKRIKPDTVTYGIILDGLFHAARTVVARKMFHEMIESETTVDIPVYNIILKGLCRNNCADEAIAMFQKLGAMNVKFDIGTLNTMINSLYKVGRKEEAKDLFAAISASRLVPNASTYSIMIINYLKEGSVEDAKHIFFINGQEWYSSQLSSYKLYHQNVVFLRKYHQNVVGKR

SEQ ID NO: 348 - protein, 209 aa, Triticum aestivum
MKSVGAEPDIVTYNTLVNGYCRNGRIDDGLTLFREMPHKRIKPDTVTYGIILDGLFHAARTVVARKMFHEMIESETTVDIPVYNIILKGLCRNNCADEAIAMFQKLGAMNVKFDIGTLNTMINSLYKVGRKEEAKDLFAAISASRLVPNASTYSIMIINYLKEGSVEDAKHIFFINGQEWYSSQLSSYKLYHQNVVFLRKYHQNVVGKR

SEQ ID NO: 349 - protein, 321 aa, Triticum aestivum; identical to SEQ ID NO: 347

SEQ ID NO: 350 - protein, 174 aa, Triticum aestivum
MPHKRIKPDTVTYGIILDGLFHAARTVVARKMFHEMIESETTVDIPVYNIILKGLCRNNCADEAIAMFQKLGAMNVKFDIGTLNTMINSLYKVGRKEEAKDLFAAISASRLVPNASTYSIMIINYLKEGSVEDAKHIFFINGQEWYSSQLSSYKLYHQNVVFLRKYHQNVVGKR

SEQ ID NO: 351 - protein, 209 aa, Triticum aestivum; identical to SEQ ID NO: 348

SEQ ID NO: 352 - protein, 209 aa, Triticum aestivum; identical to SEQ ID NO: 348

SEQ ID NO: 353 - protein, 654 aa, Triticum aestivum
MPRRSRPAGGILMGCFCGAHRPDLGLALFGRFLGTGLKTNKIVATTFLKCLCYAKRTDEAVNLLLRRMPELGCVPDAISYTIVLKSLCENSMSQRALDLLQMVAEGGGACSLNVVVYSTVIHGFFKEGETGKACNLFHEMIHQGVVPNVVTYSSIIDALCKARAMDKAELVLQQMVDSGAQPNNVTYTCMIHGYSTSGQLKEAAKMFRKMTTRGLVPDIVTCSSLMTFLCKHGRSKEAAEIFYSMTAKGLKPNIIAYSILLHGYATEGCFVDMNNLFNSMEDNGIAANCYVFNILIYAYAKRGMMDEAMLIFTEMREKGVSPDVVTYSTVIAAFCRLRRLANAMDKFNEMTDMGFQPDTTVYHSLIQGFCMHGDLVKAKGLVSEMMNKGIPRPDIAFFNSIINTLCKEGGVMDAQDVFDLVTAIDERPNIITFNSLIDGYCLVGEMDKAFGVLDAMKSVGAEPDIVTYNTLVNGYCRNGRIDDGLTLFREMPHKRIKPDTVTYGIILDGLFHAARTVVARKMFHEMIESETTVDIPVYNIILKGLCRNNCADEAIAMFQKLGAMNVKFDIGTLNTMINSLYKVGRKEEAKDLFAAISASRLVPNASTYSIMIINYLKEGSVEDAKHIFFINGQEWYSSQLSSYKLYHQNVVGKR

SEQ ID NO: 354 - protein, 664 aa, Triticum aestivum
MPRRSRPAGGILMGCFCGAHRPDLGLALFGRFLGTGLKTNKIVATTFLKCLCYAKRTDEAVNLLLRRMPELGCVPDAISYTIVLKSLCENSMSQRALDLLQMVAEGGGACSLNVVVYSTVIHGFFKEGETGKACNLFHEMIHQGVVPNVVTYSSIIDALCKARAMDKAELVLQQMVDSGAQPNNVTYTCMIHGYSTSGQLKEAAKMFRKMTTRGLVPDIVTCSSLMTFLCKHGRSKEAAEIFYSMTAKGLKPNIIAYSILLHGYATEGCFVDMNNLFNSMEDNGIAANCYVFNILIYAYAKRGMMDEAMLIFTEMREKGVSPDVVTYSTVIAAFCRLRRLANAMDKFNEMTDMGFQPDTTVYHSLIQGFCMHGDLVKAKGLVSEMMNKGIPRPDIAFFNSIINTLCKEGGVMDAQDVFDLVTAIDERPNIITFNSLIDGYCLVGEMDKAFGVLDAMKSVGAEPDIVTYNTLVNGYCRNGRIDDGLTLFREMPHKRIKPDTVTYGIILDGLFHAARTVVARKMFHEMIESETTVDIPVYNIILKGLCRNNCADEAIAMFQKLGAMNVKFDIGTLNTMINSLYKVGRKEEAKDLFAAISASRLVPNASTYSIMIINYLKEGSVEDAKHIFFINGQEWYSSQLSSYKLYHQNVVFLRKYHQNVVGKR

SEQ ID NO: 355 - protein, 664 aa, Triticum aestivum; identical to SEQ ID NO: 354

SEQ ID NO: 356 - protein, 788 aa, Triticum aestivum
MPRFSSTTSMSSLRLRLHARHSSSASQPSHSQGWDPHAAFAAATQRARSGSLTPADAHHLFDELLRQANPVQERPLNNLLAAIARAPASNACRNGPALAVALFSRISQGARLWVVQPTACTYGILMDCCCRARRPDLSLAFFGRLLKTGLEANQVVFNTLLKGLCHTKRADEALDVLLHRMPELGCTPDVVAYNTVIHGFFKEGHVSKACNLFHEMAQQGVKPNVVTYNSVIDALCKARAMDKAEVVLRQMIDDGVGPDNVTYSSLIHGYSSSGHWKEAVRVFKEMTSRRVTPNVHTYNMFITFLCKHGRSKEAAGIFDSMAMKGLKPDNVSYAILLHGYATEGCLVDMINLFNSMERDCILPNCRIFSILINAYAKSGKLDKAMLIFKEMQKQGVSPDAFTYSTVIHAFCKKGRLDDAVIKFNQMIDTGVRPDTAVYRSLIQGFCTHGDLVKAKEYVTEMMKKGMLPPDIMFFSSIMQNLCTEGRVTEARDILDLIVHIGMRPNVIIFNLLIGGYCLVRKMADALKVFDDMVSYGLEPCNFTYGILINGYCKNRRIDDGLILFKEMLHKGLKPTTFNYNVILDGLFLAGQTVAAKEKFDEMVESGVSVCIDTYSIVLGGLCRNSCSSEAITLFRKLSAMNVKFDITIVNIIIGALYRVERNQEAKDLFAAMPANGLVPNAVTYTVMMTNLIKEGSVEEADNLFLSMEKSGCTANSCLLNHIIRRLLEKGEIVKAGNYMSKVDAKSYSLEAKTVSLLISLFSRKGKYREHIKLLPTKYQFLEEAATVE

SEQ ID NO: 357 - protein, 778 aa, Triticum aestivum
MSNLRLLRRSSSSMSTTRSPLSRVWSPHSAFAAATERVRTGTLSQDDAHHLFDELLRQGNPVQERPLNNFLAALARAPASASCSDGPALAVALFGRLSRGAGQRVAQPNVFTYGVLMDCCCRACRTDLALAFFGRLLRTGLQAGQVVFNTLLKGLCHTKRADEALDVLLHRMPELGCTPDVVAYNTVIHGFFREGQVGKACDMFHGMAQKGVMPNVVTYNSVIDALCKARAMDKAETVLSQMVNDGVRPDNVTYNSLIHGYSSLGNWKEAVRVFKEMSRRFTPDVITCTSLMAFLCKNGKSKEAAEIFDSMAMKGLKRDTVSYAILLHGYATEGCLVDMINLFNSMATDCILPNCHIFNILINAYAKSGMMGEAMLIFKKMHEQGVSPDVVTYSTVIHAFCKMGSLDIAMDKFNQMVDMGVRPNAIVYHSLIQGFCTHGDLVKAKELVTEMRNKAMRPPDIKIFHSIMKNLCTEGRVIEARDILDLMVHIGMRPDVPIFNLLIGGYCLVHKMEDATKMFDDMVSYGLEPCNSTYGILINGYCKNGRIDDGLNLFKEMLRKGLKPTTFNYNVILDGLFLAGRTVAAKEKFDEMVESGVSVCIDTYSIVLGGLCRNNCTGEAITLSKKLSTMNVKFNIAIVNILIGAFFRVRRNQEAKDLFAAIPANGLVANVVTYSMMMINLIKEGSLEEADDLFLSMEKSGCTADSCMLNHIIRRLLERGEIVKAGNYMSKVDAKSYSLEAKTVSLLISLFLGKGRYREHMKLLPMKYQFLEEAATVE

SEQ ID NO: 358 - protein, 790 aa, Triticum aestivum
MPRFSSTTPMSPLRLRLRLRLGARHSSSTSHSSRSWDPHSAFAAAAERARSGNLTPEDAHHLFDELLRQGNPVQDRPLNKLLSALARAPASAACRNGPALAVNLFSRISQGARRRVAEPTACTYGILMDCCCRAHRLDLTLAFFGGLLKTGLKAGVIQVCTLLKGLCRAKRADEALDVLLHRMPELGCTPDVVAYTTVIHGFFKEGQVGKACNLFHGMAQQGVAPNLVTYNSVIDALCKAKAMDKAEYFLGQMVDDGVVPDNVTYNSLIHGYSSSGHWKEAVRVFKEMTSRRVTADVHTYNMFMTFLCKHGRSKEAAGIFDTMAIKGLKPDNVSYAIRLHGYATEGCLVDMINLFNSMERDCILPDCRIFSILINAYAKSGKLDKAMLLFKEMQKQGVSPDAVTYSTVIDAFCKKGQLDDAMIKFNQMIDTGVRQGTAVYGSLIQGFCTHGDLVKAKELLTEMMNKGIPPPDIKFFHSIMQNLCTEGRVIEAQDILDLMVHTGERPNVVTFSVLVGGYCLVRKMADASKVFDDMVSYGLEPCNIMYGILINGYCKNRRIDDGLILFKEMLHKGLKPTTFNYNVILNGLFLAGQTVAAKEKFDEMVESGVSVCIGTYSIVLGGLCRNGCSSEAITLFRKLSAMNVKFNITIVNTIIGAFYRVERNQEAKDLFAAVSANGLVADVFTYTIMMKNLIKEGSVEEADDLFLSMEKSGCTADSYMLNLIVRMFLGKGEIVKAGNYISKIDAKSYSLEAKTVSLLISLFSGKGKYREHIGLLPAKYRFREEAATVV

SEQ ID NO: 359 - protein, 792 aa, Triticum aestivum
MPRFSSTTPMSPPRLLLRLGARHSSSTSHPSRIWDPHAAFAAATQRARSGTLTTEDAHHLFDELLRQGNPVQERPLTNFLAALARAPASAFCSDGPALAVALFGRLSRGAGRRVAQPNVFTYGVLMDCCCRARRLDLAIAFFARLLKTGLEANQVIFCTLLKGLCHAKRSDEALDVVLHRMPELGCTPNVVAYTTVIHGFLKEGQVGKACNLFHGMAQQGVAPDVVTYNSVIDALCKARAMDKAEYFLREMVDNGVVPNNVTYNSLIHGYSSLGHQKEAVRVLKEMTRQGIIPDVITCTSLMTFLCKNGKSKEAAEIFDSMATKGLKHDAVSYAILLHGYATEGCLVDMINLFNSMDRDCILPNCHIFNILIYAYAKSGKLDKAMLIFRDMQKQGVSPDAFTYSTLIHAFCKKGRLDDAMIKFNQMVDTGVRQGTAVYGSLIQGFCTHGDLVKGKELVTEMMNKGIPPPDIMFFHSIMQNLCTEGRVVEARDILGLIAHIGMRPNVCTFNILIGGYCLVRKMEDASKIFHDMMSYGLEPSNVTYGILINGYCKNRRIDDGLILFKEMLRKGLKPTTFNYNIILDGLFLAGRTVAAKEKFDEMVESGVSMCISTYSIVLRGLCRNNCSGEAITLFQTLSAMDVKFNIRIVNIMIDAFFRVQRKQEAKDLFAAITANGLVANVFTYSLMMTNLIKEGSVEEADTLFLSMEMSGCTSNSWMLNLIIRGLLEKGEIVKAGCYMSKVDAKSYSLEAKTVSLLIYLFSGKGKYREHIRLLPTKYQFLEEAATVEWFAI

SEQ ID NO: 360 - protein, 792 aa, Triticum aestivum
MPRFSTTTPMSPPRLLLRLGARHSSSTSHPSRIWDPHAAFAAATQRARSGTLTTEDAHHLFDELLRQGNPVQERPLTNFLAALARAPASAFCSDGPALAVALFGRLSRGAGRRVAQPNVFTYGVLMDCCCRARRLDLAIAFFARLLKTGLEANQVIFCTLLKGLCHAKRSDEALDVVLHRMPELGCTPNVVAYTTVIHGFLKEGQVGKACNLFHGMAQQGVAPDVVTYNSVIDALCKARAMDKAEYFLREMVDNGVVPNNVTYNSLIHGYSSLGHQKEAVRVLKEMTRQGIIPDVITCTSLMTFLCKNGKSKEAAEIFDSMATKGLKHDAVSYAILLHGYATEGCLVDMINLFNSMDRDCILPNCHIFNILIYAYAKSGKLDKAMLIFRDMQKQGVSPDAFTYSTLIHAFCKKGRLDDAMIKFNQMVDTGVRQGTAVYGSLIQGFCTHGDLVKGKELVTEMMNKGIPPPDIMFFHSIMQNLCTEGRVVEARDILGLIAHIGMRPNVCTFNILIGGYCLVRKMEDASKIFHDMMSYGLEPSNVTYGILINGYCKNRRIDDGLILFKEMLRKGLKPTTFNYNIILDGLFLAGRTVAAKEKFDEMVESGVSMCISTYSIVLRGLCRNNCSGEAITLFQTLSAMDVKFNIRIVNIMIDAFFRVQRKQEAKDLFAAITANGLVANVFTYSLMMTNLIKEGSVEEADTLFLSMEMSGCTSNSWMLNLIIRGLLEKGEIVKAGCYMSKVDAKSYSLEAKTVSLLIYLFSGKGKYREHIRLLPTKYQFLEEAATVEWFAI

SEQ ID NO: 361 - protein, 792 aa, Triticum aestivum; identical to SEQ ID NO: 359

SEQ ID NO: 362 - protein, 792 aa, Triticum aestivum; identical to SEQ ID NO: 360

SEQ ID NO: 363 - protein, 788 aa, Triticum aestivum
MPRFSSTMPMSPPHLLLRLCARHSSSTSHPSRIWDPHAAFAAATQRARSGTLTTEDAHHLFDELLRQGNPVQERPLTNFLAALARAPASASCSDGPALAVALFGRLSRGAGRRVAQPNVFTYGVLMDCCCRARRLDLAIAFFGRLLKTGLEADRVVFSTLLKGLCHAKRSDEALDVLLHRMPEQGCTPYVVAYNTVIHGFFREGQVGKACDLFHGMAQQGVMPDVVTYNSVIDALCKARAMDKAEYFLRQMVDDGVVPNNVTYNSLIHGYSSSGHWKEAIRVFKEMTSRRITADVHTYNMFMTFLCKHGRSEEAAGIFDTMAMKGLKPDNVSYAIRLHGYATEGCLVDMINLFNSMERDCILPDCCIFNILINAYAKSGKLDKAMLIFNEMQKQGVSPDAVTYLPVIDAFCKKGRLDDAMIMFNQMIDTGVRPATAVYTSLIQGFCTHGDLVKAKELVTEMMNKGIPPPDIKFFHSIMQNLCTEGRVTEARDILGLIAHIGMRPNVCTFNILIGGYCLVRKMTDASKVFDDMVSYGLEPCNFTYGILINGYCKNRRIDDGLTLFKEMLHKGLKPKAFNYNVILDGLFLAGQTVAAKEKFDEMVESGVSVCIDTYSIVLGGLCRNSCSSEAITLFRKLSAMNVKFDITIVNTIIGAFYRVERNQEAKDLFAAIPASGLVPNVVTYTIMMKNLIKEGSVEEADNLFLSMEKSGCSANSYLLNHIIRRLLEKGERVKAGNYMSKVDAKSYSLEAKTVSLLISLFSRKGKYREHIKLLPTKYQFLEEAATVE

SEQ ID NO: 364 - protein, 742 aa, Triticum aestivum
MSPLRLHARRSYSTSHPPRSQGWDPHAAFAAATERARSGNLTSEDAHKLFDQLLLQANPVNMRLPNDLLTALARAPASAACSNGPALAVTLFTRLSRGARQPVVQPTACTYGILMDCCCRANRQDLALAFFARLLRTGLKAGVIEVNTLLKGLCRAKRADEALDILLHRMPELGCTPNVVAYTTVIHGFLKEGQVGKACNLFHGMAQQGVAPNVVTYNSVIDALCKARAMDKAEYFLRQMVDNGVVPDNVTYNSLIHGYSSSGHWKEAVRVLKEMTSQGIIPDIVSYRILLHGYATKGCLVDMINLFNSMARYCILPDCHIFNILINAYAKSGKLDKAMLIFKEMQKQGVSPDAVTYSTVIHAFCKNGRLDDAVIKFNQMIDTGVQPDTSVYNALIQGFSTNGDLVKAKELVTEMMNKGIPPPDIKFFHSIMQNLCTEGRLTEARDILGLIAHIGMRPNVCTFNILIGGYCLVRKMADASKVFDDMVSYGLEPCNFTYGILINGYCKNRRIDDGLILFKEMLHKGLKPTTFNYNVILDGLFLAGQTVAAKEKFNEMVESGVSVCIDTYSIVLGGLCTNNCCGEAITLFQKLSTMEVKFDIIIVNTMIDAFYRVRQNQEAKDLFAAVSANGLVANVFTYTIMMTNLIKEGSLEEADNLFLSMEKSGCTADSFMLNLIIRRLLEKGEIVKAGNYISKVDAKSYSLEAKTVSLLISLFSGKGKYRAHIRLLPSKYQFREEAGTVE

SEQ ID NO: 365 - protein, 287 aa, Triticum aestivum
MRPNVCTFNILIGGYCLVRKMADASKVFDDMVSYGLEPCNFTYGILINGYCKNRRIDDGLILFKEMLHKGLKPTTFNYNVILDGLFLAGQTVAAKEKFNEMVESGVSVCIDTYSIVLGGLCTNNCCGEAITLFQKLSTMEVKFDIIIVNTMIDAFYRVRRNQEAKDLFAAVSANGLVANVFTYTIMMTNLIKEGSLEEADNLFLSMEKSGCTADSFMLNLIIRRLLEKGEIVKAGNYISKVDAKSYSLEAKTVSLLISLFSGKGKYRAHIRLLPSKYQFREEAGTVE

SEQ ID NO: 366 - protein, 289 aa, Triticum aestivum
MQKQGVSPDAVTYSTVIHAFCKNGRLDDAVIKFNQMIDTGVQPNTSVYNALIQGFSTNGDLVKAKELVTEMMNKGMHPPDIKVFHSVMQNLCTEGRVTEARDILDLIVHIGMRPDVFTFTSLIGGYCLVRNMEDASKIFDDMVSYGLEPSNITYGILINGYCKNKRIDEGLILFKEMLRKGLKPTTINYNVILDGLFLAGRTVAAKEKFNEMVESGVSVCIDTYSIVLGGLCTNNCCGEAITLFQKLSKMNVKFNIRIVNIMIDAFFKVQRKQEAEDLFAAISANGLVC

SEQ ID NO: 367 - protein, 769 aa, Triticum aestivum
MPRRLPPVLLPLHTKAMPRLSSTTPMSPLRLRLRLRARHSASTSHSSRSWEPHAAFAAATERARSCNLTPEDAHHLFDELLRQAKPVQERPLNNLLAALARAPASAACSDGPALAVNLFGRISQGARRRVAHPTACTYGILMDCCCRAHRLDLAFAFFGHLLRTGLKAGVIHVCTLLKGLCRAKRADEALDVLLHRMPELGCTPDVVAYTTVIHGFFKEGQVSKACNLFHEMALQGVAPNVVTYSSVIDALCKARAMDKAEYFLRQMVHNGVLANNVTYNSLIHGYSSSGHWKEAVRVLKEMTSQGIIPDIVSYRILLHGYATEGCLVDMINLFNSMARYCILPDCHIFNILINAYAKSGKLDKAMLIFKEMQKQGVSPDAVTYSTVIHAFCKNGRLDDAVIKFNQMIDTGVQPNTSVYNALIQGFSTNGDLVKAKELVTEMMNKGMHPPDIKVFHSVMQNLCTEGRVTEARDILDLIVHIGMRPDVFTFTSLIGGYCLVRNMEDASKIFDDMVSYGLEPSNITYGILINGYCKNKRIDEGLILFKEMLRKGLKPTTINYNVILDGLFLAGRTVAAKEKFNEMVESGVSVCIDTYSIVLGGLCTNNCCGEAITLFQKLSKMNVKFNIRIVNIMIDAFFKVQRKQEAEDLFAAISANGLVANVFTYSLMMTNLIKEGSAEEADTLFLSMEKSGCTANSWMLNLIIRRLLEKGEIVKAGNYMAKVDAKSYSLEAKTVSLLISLFSGKGKYREHIRLLPTKYQFREEAATVE

SEQ ID NO: 368 - protein, 783 aa, Triticum aestivum
MARLCFTTPMPHLRRRYSSFTSPPSRRWDPRPAFAAATERVRAGTLSPEDAHHLFDELLLQANPVPERSLNGFLAALARAPSSATLRDGPSLALALFNRVCREEAGPPVAPPTVRTYNILMDSCCRARRPDLGLAFFGRFLRAGLKVNLIVASTLLKCLCHARRTDEAVNMLLHRMSEFGCVPDAISYSIVLKGLCDNSRSQQALDLLQMVRKGGACSLSVVAYSIIIHGFFKEGEVSKACNLFHEMMQQGVVPDVVTYSSIIDALCKVRAMDKAKLVLQQMVNNGVRPNMYTWNSFMYSLCKHGRSKEAAEFFNSMTAKGLKPDIVAYSTLLHGYATEGCLTDMINFFNSMERNGIVANCKVFTILIDGYAKCGMTDEAMLIFTKMQEQGVSPNVFTYAIVTAALCRMGRLSDAMEKLNEMIAMGLQPNKVVYHSLIQVFCTHGDLVKAKALVSEMMNKGIPRPNIVFFNSVINSLCKEGRVTDAHDIFDLAINIGERPDVITFNSLIDGYCLAGKMDKAFGVLDAMVSSGIEPNVVTYNTLVGGYSRNGRIDDGLTLFREMMHIKIKPTTATYGAILHGLFRAGRTFSAKKMFNEMIESGTTVNISIYAIILGGLCRNNCVDEAIVLFEKLGAMNVKLDVGIFNTMINAMYAVKGREEAEDLFAAISANGLVPNASSYGVMITNLLREGLVEEADNMFSSMDKSGCAPSSRLLNNIIRMLLEKGEISKAGNYMSKVDGKNISLEASTTSLLLSLFSREGKYREQIKLLPAKYQFFDGSSHS

SEQ ID NO: 369 - protein, 783 aa, Triticum aestivum; identical to SEQ ID NO: 368

SEQ ID NO: 370 - protein, 783 aa, Triticum aestivum; identical to SEQ ID NO: 368

SEQ ID NO: 371 - protein, 783 aa, Triticum aestivum; identical to SEQ ID NO: 368

SEQ ID NO: 372 - protein, 783 aa, Triticum aestivum; identical to SEQ ID NO: 368

SEQ ID NO: 373 - protein, 783 aa, Triticum aestivum; identical to SEQ ID NO: 368

SEQ ID NO: 374 - protein, 776 aa, Triticum aestivum
MSPPRLRLHARHSSSASQPSRSQGWDPHAAFAAAAECARSGNLTPEDAHNLFDQLLQHGNPVQERALNSLLAALARTPASAACRDGPALTVALFSRISKGRVAQPNVFTYGVLMADCCCRAHRPDLTLAFFGRFLRTGLEADQVVFNTLLKGLCHAMRAGEAVNVLLHRMPDLGCTPNVVAYNTVIHGFFREGQAGKACDMFHGMAQKGVMPNVVTYNSVIDALCKARAMDKAETVLSQMVNDGVRPDNVTYNSLIHGYSSLGNWKEAVRVFREMSQRFTPDVVTCTSLMAFLCKNGKSKEAAEIFDSMATKGLKRDTVSYAILLHGYATEGCLVDMDNLFNSMVRGCIVPDCHIFNILIDAYAKSEKLDKAMLMFKEMQKHGVSPNAVTYPTVIHAFCKMGSLDIAMDKFNQMVDMGVRPNAIVYHSLIQGFCTHGDLVKAKELVTEMRNKAMRPPDIKFFHSIMQNLCTEGRVIEARDILDLMLHIGMRPDVPIFNLLIGGYCLVREMEDATKMFDDMMSYGLEPCNNTYGILINGYCKNGKIDDGLNLFKEMLHKGLKPTTFNYNVILDGLFLAGRTVAAKVKFNEMVESGVSVCIDTYSIVLGGLCRNNCTGEAITLSKKLSTMNVKFNIAIVNILIGPFFRVRRNQEAKDLFAAIPSNGLVANVVTYSIMMTNLVKEGSVEEADTLFLSMEKSGCTANSCMLNHIIRRLLEKGEIVKARNYMSKVDAKSYSLEAKTVSLLISLFSGKGKYRERKKLLPMKYQFLEEAATVE

SEQ ID NO: 375 - protein, 323 aa, Triticum aestivum
MLPPDIAFFNSIMQNLCTEGRVIEARDVLGLIAHIGMRPDVCTFNILIGGYCLVGKMEDASKIFDDMMSYGLEPSNITYGILINGYCKNRRIDDGLILFKEMLHKGLKPTTFNYNVILDGLFLAGRTVAAKEKFDEMVESGVSVCIGTYSIVLGGLCRNNCSGEAITLFQKLSTMDVKFNITIVNIMIDAFYRVQRNQEAKDLFAAVSANGLVANVFTYTIMMKNLIKEGSVEEADDLFLSMEKSGCTADSYMLNLIVRMLLEKGELVKAGNYMSKVDAMSYSLEAETVSLLISLFSGKGKYREHIGLLPAKYRFREEAATVV

SEQ ID NO: 376 - protein, 663 aa, Triticum aestivum
MDCCCRAHRLDLAFAFFGRLLRTGLKAGVIQVCTLLKGLCRAKRADEALDVLLHRMPELGCTPDVVAYTTVIHGFFKEGQVGKACNLFHGMAQQGVAPNLVTYNLVIDALCKAKAMDKAEYFLGQMVDDGVVPDNVTYNSLIHGYSSSGHWKEAVRVFKEMTSRRVTADVHTYNMFMTFLCKHGRSKEAAGIFDTMAMKGLKPDNVSYAILLHGYATEGSLVDMINLFNSMERDCILPDCCIFNILINAYAKSGKLDKAMLIFNEMQKQGVSPNAVTYSTIIHAFCKNCRLDDAVIKFNQMIDTGVRQGTAVYRSLIQGFCTHGDLVKAKELLTEMMNKGMLPPDIAFFNSIMQNLCTEGRVIEARDVLGLIAHIGMRPDVCTFNILIGGYCLVGKMEDASKIFDDMMSYGLEPSNITYGILINGYCKNRRIDDGLILFKEMLHKGLKPKTFNYNVILDGLFLAGRTVAAKEKFDEMVESGVSVCIGTYSIVLGGLCRNNCSGEAITLFQKLSTMDVKFNITIVNIMIDAFYRVQRNQEAKDLFAAVSANGLVANVFTYTIMMKNLIKEGSVEEADDLFLSMEKSGCTADSYMLNLIVRMLLEKGGLVKAGNYMSKVDAMSYSLEAETVSLLISLFSGKGKYREHIGLLPAKYRFREEAATVV

SEQ ID NO: 377 - protein, 344 aa, Triticum aestivum
MDCCCRAHRLDLAFAFFGRLLRTGLKAGVIQVCTLLKGLCRAKRADEALDVLLHRMPELGCTPDVVAYTTVIHGFFKEGQVRKACNLFHGMAQQGVAPNLVTYNLVIDALCKAKAMDKAEYFLGQMVDDGVVPDNVTYNSLIHGYSSSGHWKEAVRVFKEMTSRRVTADVHTYNMFMTFLCKHGRSKEAAGIFDTMAMKGLKPDNVSYAILLHGYATEGSLVDMINLFNSMERDCILPDCCIFNILINAYAKSGKLDKAMLIFNEMQKQGVSPNAVTYSTIIHAFCKKGRLDDAVIKFNQMIDTGVRQGTAVYRSLIQGFCTHGDLVKAKELLTEMMNKRYASS

SEQ ID NO: 378 - protein, 788 aa, Triticum aestivum
MPRFSSTTPMSPPRLLLRLRARHSSSTSHPSRIWDPHAAFAAATERGRSGNLTPEDAHHLFDELLWQGNPVQDRPLNKLLSALARAPASAACRNGPALAVALFSRISQGARRRVAEPTACTYGILMDCCCRAHRLDLALAFFARLLKTGLEANQVIFNTLLKGLCHAKRSDEALDVLLHRMPELGCTPGVVAYNTVIHGFFKEGQVGKACNLFHEMVQQGVMPDVVTYNSVTDALCKARGMDKAEYFLRQMVDDGVVPDTVTYNSLIHGYSSSGHWKEAVRVFKEMTSRRVTPDVHTYNMFITFLWKHGRSKEAAGIFDSMAMKGLKPDNVSYAILLHGYATEGCLVDVINLFNSMATDCILPNCHIFNILINAYAKSGKLDKAMLIFREMQKQGVSPDAFTYSTLIHAFCKKGRLDDAMIKFNQMVDTGVRQGTAIYGSLIQGFCTHGDLVKGKELVTEMMNKGIPPPDIMFFHSIMQNLCTEGRVIEARDILGLIAHIGMRPNVCTFTILIGGYCLVCKMEDATKMFEDMVSFGLEPCNITYGILINGYCKNRRIDDGLILFQEMLHKGLKPTTFNYNVILDGLFLAGRTVAAKEKFDEMVESGVSVCTDTYSIVLAGLCRNNCSSEVIMLFQKLRAMNMEFNIRIVTIMIDAFYKVRRNQEAKDLFAAIPSNGLVANVVTYSIMMKNLIKEGSVEEADTLFLSMEKSGCTATPWMLNHIIRRLLERGEIVKAGNYMSKVDAKSYSLEAKTVSLLISLFSGKGKYREHIKLLPMKYQFLEEAATVE

SEQ ID NO: 379 - protein, 785 aa, Triticum aestivum
MSPLRLRLRLRPRLHARHSYSTSHPPRGQGWDPHASFAAATERARSGNLSSEDAHHLFDQLLLQANPVNMRLPNDLLTALARAPASASCSNGPALAVALFSRLSQGARQRVVQPTACTYGILMDCCCRANRQDLALAFFARLLRTGLKAGVIEVNTLLKGLCRAKRADEALDILLHRMPELGCTPNVVAYNTVIHGFFQEGQAGKACSLFHEMAQQGVAPSLVTYNSVIDALCKARAMDKAEYFLGQMVDDGVIPDNVTYNSLIHGYSSSGHWKEAVRVFKEMTSRRVKPNVHTHNMFMTFLCKHGRSKEAAGIFDTMAMKGLKHNNVSYAILLHGYATEGCLVDMINLFNSMERYCILPDCRIFNILIHAHAKSGKLDKAMLIFNEMQKQGVSPNAVTYSTIIHAFCKKGRLDDAVIKFNQMIDTGVRQGTAVYRSLIQGFCTHGDSVKAKELLTEMMNKGMLPPDIAFFNSIMQNLCTEGRVIEARDVLGLIAHIGMRPDVCTFNILIGGYCLVGKMEHASKIFDDMMSYGLEPSNITYGILINGYCKNRRIDDGLILFKEMLHKGLKPTTFNYNVILDGLFLAGRTVAAKEKFDEMVESGVSVCIGTYSIVLGGLCRNNCSGEAITLFQKLSTMDVKFNIIIVNIMIDAFYKVQRNQEAKDLFAAVSANGLVANVFTYTIMMKNLIKEGSVEEADDLFLSMEKSGCTADSYMLNLIVRMLLGKGEIVKAGNYISKIDAKSYSLEAKTVSLLISLFSGKGKYREHIGLLPAKYRFREEAATVV

SEQ ID NO: 380 - protein, 328 aa, Triticum aestivum
  misc_feature (15)..(15): Xaa can be any naturally occurring amino acid
  misc_feature (64)..(64): Xaa can be any naturally occurring amino acid
MMKKGMLPPDIKFFXSIMQNLCTEGRVIEARDVLGLIAHIGMRPDVCTFNILIGGYCLVGKMEXASKIFDDMMSYGLEPSNITYGILINGYCKNRRIDDGLILFKEMLHKGLKPTTFNYNVILDGLFLAGRTVAAKEKFDEMVESGVSVCIGTYSTVLGGLCRNNCSGEAITLFQKLSTMDVKFNIIIVNIMIDAFYKVQRNQEAKDLFAAVSANGLVANVFTYTIMMKNLIKEGSVEEADDLFLSMEKSGCTADSYMLNLIVRMLLGKGEIVKAGNYISKIDAKSYSLEAKTVSLLISLFSGKGKYREHIGLLPAKYRFREEAATVV

SEQ ID NO: 381 - protein, 785 aa, Triticum aestivum; identical to SEQ ID NO: 379

SEQ ID NO: 382 - protein, 792 aa, Triticum aestivum
MPRFSSTTPMSPPRLLLRLRARHSSSTSHPSRIWDPHAAFAAATQRARSGTLTTEDAHHLFDELLRQGNPVQERPLNNFLAALARAPASASCSGGPALAVALFGHLSRGAGRRVAQPNVFTYGVLMDCCCRACRPDLALAFFGRLLKTGLEADQVVFSTLLKGLCHAKRADEALDVLLHRMTELGCTPNVVAYNTVIHGFFREGQVGKACALFHGMAQQGVTPDVVTYNSVIDPLCKAKAMDKAEYFLCQMVDNGAVPNNVTYNSLIHGYSSSGHSKEAVRVLKEMTSKGIIPDVFTCNSLMASLCKNGRSKEAAEIFDSMSMKGLKPNTVSYAIRLHGYATEGCLIDMINLFNSMERDCILPDCHIFSILINAYAKSGKLDKAMLIFKKMRKQGVSPNAVTYSTVIDAFCKKGRLDDAVIEFNQMIDTGVRPNTAVYCSLIQGFCTHGGLVKAKEYVTEMMNKGMLPPDIMFFHSVMQNLCTEGRVIEARDILGLIAHIGMTPDACTFNILIGGYCLVCKMEDSTNMFNDMVSYGLEPCNITYGILINGYCKNRRIDEGLILFKEMLRKGLKPTTFNYNVILDGLFLAGRTVAAKEKFNEMVESGVSMWISTYSIVLRGLCRNNCSGEAITLFQKLSAMDVKFNIRIVNIMIDAFFRVQRKQEAKDLFAAITANGLVADVFTYSLMMTNLIKEGSVEEADTLFLSMEMSGCTSNSWMLNLIIRRLLEKGEIVKAGCYMSKVDAKSFSLEAKTVSLLISLFSGKGKYREHIRLLPTKYQFLEEAATVEWFAT

SEQ ID NO: 383 - protein, 792 aa, Triticum aestivum; identical to SEQ ID NO: 382

SEQ ID NO: 384 - protein, 792 aa, Triticum aestivum; identical to SEQ ID NO: 382

SEQ ID NO: 385 - protein, 792 aa, Triticum aestivum; identical to SEQ ID NO: 382

SEQ ID NO: 386 - protein, 792 aa, Triticum aestivum; identical to SEQ ID NO: 382

SEQ ID NO: 387 - protein, 792 aa, Triticum aestivum; identical to SEQ ID NO: 382

SEQ ID NO: 388 - protein, 771 aa, Triticum aestivum
MPTARLSSIFTSSFRDPSRAPLAALAAATERVRAGTLTREDAHHLFGELLGQAAAVPERGLNNFLATLARAPPSPACSDGPGLAIALFNRMSRGAGARVVSPTLCTYSILMDCCCRAGRPDLVVAFFGRLIRLGLRLEVISVSNLLKGLCQAKRTNEAVALLLHGTPELDCVPNVFSYSIVINGCFKEGEVDKACNLFHGMIQLGVQPNVVIYTSIIDALSKCRAMDKAEVVLQQMVDQGIEPNIRTYTTLIHGYSASGQWKAAVRVFKEMASVGVLPNAVTLNSFMDSLCKHRRTKEARVIFDSMAAKGQKPDVVSYSTMLSGYAKEGCFDDMTCLFNSMLQNGVVPNHHIFNILINAYAKRGLMDAAMHMFEVMRQQGVNPDVFSYQIVMDSLCKMGRMDAALDKFNQMVNQGVSPDIVVYRCLVLGSCSHGDFEKAKELISEAVNRGLCSNSVFFYPVINDLCKEGKVKEAQDMFDFIVGIGQRPDVIMYNSLMDGYCLVGKVEEALRVLDAMKSVGLQPDAFTYGILLNGYCKIGKIADGLSLFREMSLNGVKPMTIMYNIILHGLFFSGRTVSAKEIFHTMNASGIPVGVDTYNIVLSGLCKNNCTDEAIELFKKLRAMNVKINVIILNTMISAMFKTRRIEEAKDLFATISAIGLVPSVVTYSVMMTNFIKEGLLAEADDMFLAMEKASCAPNSSLLNQVVRALLEKGAVVKAATYLAKLDAKQLSVEASTISLIVSLFSGEGKLREHVELLPVKYQPPESSADN

SEQ ID NO: 389 - protein, 771 aa, Triticum aestivum; identical to SEQ ID NO: 388

SEQ ID NO: 390 - protein, 334 aa, Triticum aestivum
MPTARLSSIFTSSFRDPSRAPLAALAAATERVRAGTLTREDAHHLFGELLGQAAAVPERGLNNFLATLARAPPSPACSDGPGLAIALFNRMSRGAGARVVSPTLCTYSILMDCCCRAGRQDLVVAFFGRLIRLGLRLEVISFSNLLKGLCQAKRTNEAVALLLHGTPELDCVPNVFSYNIIINGCFKEGEVDKACNLFHGMIQLGVQPNVVIYTSIIDALSKCRAMDKAEVVLQQMVDQGIEPNIRTYTTLIHGYSASGQWKAAVRVFKEMASVGVLPNAVTLNSFMDSLCKHIEGQRKLELFLTPWLQRAKNLMSSPTLLCLAGMRKKDASMI

SEQ ID NO: 391 - protein, 771 aa, Triticum aestivum; identical to SEQ ID NO: 388

SEQ ID NO: 392 - protein, 361 aa, Triticum aestivum
MVNQGVSPDIVVYRCLVLGSCSHGDFEKAKELISEAVNRGLCSNSVFFYPVINDLCKEGKVKEAQDMFDFIVGIGQRPDVIMYNSLMDGYCLVGKVEEALRVLDAMKSAGLQPDAFTYGILLNGYCKIGKIADGLSLFREMSLNGVKPTTIMYNIILHGLFFSGRTVSAKEIFHTMNASGIPVGVDTYNIVLSGLCKNNCTDEAIELFKKLRAMNVKINVIVLNTMISAMFKTRRIEEAKDLFATISAIGLVPSVVTYSVMMTNFIKEGLLAEADDMFLAMEKASCAPNSSLLNQVVRALLEKGAVVKAATYLAKLDAKQLSVEASTISLIVSLFSGEGKLREHVELLPVKYQPPESSADN

SEQ ID NO: 393 - protein, 771 aa, Triticum aestivum; identical to SEQ ID NO: 388

SEQ ID NO: 394 - protein, 771 aa, Triticum aestivum
MPTARLSSIFTSSFRDPSRAPLAALAAATERVRAGTLTREDAHHLFGELLGQAAAVPERGLNNFLATLARAPPSPACSDGPGLAIALFNRMSRGAGARVVSPTLCTYSILMDCCCRAGRPDLVVAFFGRLIRLGLRLEVISVSNLLKGLCQAKRTNEAVALLLHGTPELDCVPNVFSYSIVINGCFKEGEVDKACNLFHGMIQLGVQPNVVIYTSIIDALSKCRAMDKAEVVLQQMVDQGIEPNIRTYTTLIHGYSASGQWKAAVRVFKEMASVGVLPNAVTLNSFMDSLCKHRRTKEARVIFDSMAAKGQKPDVVSYSTMLSGYAKEGCFDDMTCLFNSMLQNGVVPNHHIFNILINAYAKRGLMDAAMHMFEVMRQQGVNPDVFSYQIVMDSLCKMGRMDAALDKFNQMVNQGVSPDIVVYRCLVLGSCSHGDFEKAKELISEAVNRGLCSNSVFFYPVINDLCKEGKVKEAQDMFDFIVGIGQRPDVIMYNSLMDGYCLVGKVEEALRILDAMKSVGLQPDAFTYGILLNGYCKIGKIADGLSLFREMSLNGVKPMTIMYNIILHGLFFSGRTVSAKEIFHTMNASGIPVGVDTYNIVLSGLCKNNCTDEAIELFKKLRAMNVKINVIILNTMISAMFKTRRIEEAKDLFATISAIGLVPSVVTYSVMMTNFIKEGLLAEADDMFLAMEKASCAPNSSLLNQVVRALLEKGAVVKAATYLAKLDAKQLSVEASTISLIVSLFSGEGKLREHVELLPVKYQPPESSADN

SEQ ID NO: 395 - protein, 771 aa, Triticum aestivum; identical to SEQ ID NO: 388

SEQ ID NO: 396 - protein, 754 aa, Triticum aestivum
MPRFSSTPPMSPRRLRVGLGARHSSSTSHPSRSWEPHAAFAAATERARSGNLTPEDAHHRFDELLRQANPVQERPLNKRLSALAGAPASAACRNGPALAVALFSRISQGARRRVAHPTACTYGILMDCCCRAHRLDLAFAFFGRLLRTGLKAGVIQVCTLLKGLCRAKRADEALDVLLHRMPELGGCTPNVVAYTTVIHSFFKEGQVSKACNLFHEMALQGVTPDVVTYSSVIDALCKARAMDKAEYFLRQMVHNGVLPNNVTYNSLIHGYSSSGHWKEAVRVLKEMTSQGIIPDIISYRILLHGYATEGCLVDMINLFNSMARYCILPDCHIFNILINAYAKSGKLDKAMLIFKEMQKQGVSPDAVTYSTVIHAFCKNGRLDDAVIKFNQMIDTGVQPNTSVYNALIQGFSTNGDLVKAKELVTEMMNKGMHPPDIKVFHSVMQNLCTEGRVTEARDILDLIVHIGMRPDVFTFTSLSGGYCLVRNMEDASKIFDDMVSYGLEPSNITYGILINGYCKNKRIDEGLILFKEMLRKGLKPTTINYNVILDGLFLAGRTVAAKEKFNEMVESGVSVCIDTYSIVLGGLCTNNCCGEAITLFQKLSKMNVKFNIRIVNIMIDAFFKVQRKQEAEDLFAAISANGLVANVFTYSLMMTNLIKEGSAEEADTLFLSMEKSGCTANSWMLNLIIRRLLEKGEIVKAGNYMAKVDAKSYSLEAKTVSLLISLFSGKGKYREHIRLLPTKYQFREEAAIVE

SEQ ID NO: 397 - protein, 790 aa, Triticum aestivum
MISHSSSSQSSRPTHCKKQCYCTRRLPLVLLPLHTKAMPRLSSTTPMSPLRLRLRLRARHSASTSHSSRSWEPHAAFAAATERARSGKLTPEDAHHLFDELLRQAKPVQERPLNNLLAALARAPASAACSDGPALAVNLFGRISQGACRRVAHPTACTYGILMDCCCRAHRLDLAFAFFGRLLRTGLKAGVIQVCTLLKGLCRAKRADEALDMLLHRMPELGCTPNVVAYTTVIHGFFKEGQVSKACNLFHEMALQGVTPDVVTYSSVIDALCKARAMDKAEYFLRQMVHNGVLPNNVTYNSLIHGYSSSGHWKEAVRVLKEMTSQGIIPDIVSYRILLHGYATEGCLVDMINLFNSMARYCILPDCHIFNILINAYAKSGKLDKAMLIFKEMQKQGVSPDAVTYSTVIHAFCKKGRLDDAVIKFNQMIDTGVQPKTSVYNALIQGFSTNGDLVKAKELVMEMMNKGMHPPDIKVFHSVMQNLCTEGRVTEARDILDLIVHIGMRPDVFTFTLLIGGYCLVRNMEDASKIFDDMVSYGLEPSNITYGILINGYCKNKRIDEGLILFKEMLRKGLKPTTINYNVILDGLFLAGRTVAAKEKFNEMVESGVSVCIDTYSIVLGGLCTNNCCGEAITLFQKLSKMNVKFNIRIVNIMIDAFFKVQRKQEAEDLFAAISANGLVANVFTYSLMMTNLIKEGSAEEADTLFLSMEKSGCTANSWMLNLIIRRLLKKGEIVKAGNYMAKVDAKSYSLEAKTVSLLISLFSGKGKYREHIRLLPTKYQFREEAAIVE

SEQ ID NO: 398 - protein, 430 aa, Triticum aestivum
MKSNGIAADCRVFTILIDAYAKRGMMDDAMHIFAEMREKGVSPNVVTYATVIGALCRLGRLADAMDRFNEMTDMGVQPNTAVYHSLIQGFCMHGDLGKAKELVSDMISKGIPRPNIVFFNSVINYLCKEGRIMDAQDIFELVIIIDGKPDVITFNSLIDGHCLVSKMDKAFGVLGAMLSAGIEPNVVTYNTLVNGYSRNGRIDDGLTLFRQMPRKRIKPDSATYGIILDGLFRAGRTVAARKMFHDMIESGITVSISTYNIILAGLSRNNCAEEAIDLYQKLVAMNVKFNISIINTMINAMYKVKRKEEAKDLFAAISASGLVPNASTYGVMIINILKDGAVEDANNMFSAMDRNGIAPCSRLIDSIIRILLEKGEITMAGLYLLKLDGKNMLLEASTTSLMLSLFSRKGKYKEDVKFLPAKYQFFDGFG

SEQ ID NO: 399 - protein, 430 aa, Triticum aestivum; identical to SEQ ID NO: 398

SEQ ID NO: 400 - protein, 780 aa, Triticum aestivum
MSRLRLRRSSTTPMFHILRRSSSSTSISPPSRSWSPEGAFAAATARLSTGTLSPEEAHHLFDELLRQATPVPSRSLNGFLATLARAPASAACSRDGPALALALALFNRVCAEEADPRVAPLTVHTYGILMDCCCRARRPDLGLALFARFLRTGLKTNEIIANTFLKCLCYAKRTDEAINLLLHRMPELGCVPDAISYTIVLKSLCENSMSQRALDLLQMVAEGGGACSLNVVAYSTVIHGFFKEGETGKACNLFHEMTRQGVVPNVVTYSSIIDALCKSRAMDKAELVLQQMVDSGAQPNNVTYNCMIHGYSTSGQLKEAAKMFRKMTSHGLVPNAVTCSSLMTSLCKHGRSKEAAEIFYSMTAKGHKPDAVSYRILLHGYANEGCFADMIDLFNSMKSNGIAADCRVFTILIDAYAKRGMMDDAMHIFAEMREKGVSPNVVTYATVIAALCRLGRLADAMDRFNEMTDMGVQPNTAVYHSLIQGFCMHGDLGKAKELVSDMISKGIPRPNIVFFNSVINYLCKEGRIMDAQDIFELVIIIDGKPDVITFNSLIDGHCLVGKMDKAFGVLDAMLSAGIEPNVVTYNTLVNGYSRNGRIDDGLTLFRQMPRKRIKPDSATYGIILDGLFRAGRTVAARKMFHDMIESGITVSISTYNIILAGLSRNNCAEEAIDLYQKLVAMNVKFNISIINTMINAMYKVKRKEEAKDLFAAISASGLVPNASTYGVMIINILKDGAVEDANNMFSAMDRNGIAPCSRLINSIIRILLKKVRSPWPDFIC

SEQ ID NO: 401 - protein, 780 aa, Triticum aestivum; identical to SEQ ID NO: 400

SEQ ID NO: 402 - protein, 780 aa, Triticum aestivum; identical to SEQ ID NO: 400

SEQ ID NO: 403 - protein, 430 aa, Triticum aestivum
MKSNGIAADCRVFTILIDAYAKRGMMDDAMHIFAEMREKGVSPNVVTYATVIGALCRLGRLADAMDRFNEMTDMGVQPNTAVYHSLIQGFCMHGDLGKAKELVSDMISKGIPRPNIVFFNSVINYLCKEGRIMDAQDIFELVIIIDGKPDVITFNSLIDGHCLVSKMDKAFGVLGAMLSAGIEPNVVTYNTLVNGYCRNGRIDDGLTLFRQMPRKRIKPDSATYGIILDGLFRAGRTVAARKMFHDMIESGITVSISTYNIILAGLSRNNCAEEAIDLYQKLVAMNVKFNISIINTMINAMYKVKRKEEAKDLFAAISASGLVPNASTYGVMIINILKDGAVEDANNMFSAMDRNGIAPCSRLIDSIIRILLEKGEITMAGLYLLKLDGKNMLLEASTTSLMLSLFSRKGKYKEDVKFLPAKYQFFDGFG

SEQ ID NO: 404 - protein, 780 aa, Triticum aestivum
MQTGRLSSIFTSNATSSFRAPSPQPRPPLAALAAATERARAGTLRPEEAHHLFDELLSQAAPVPERGLNNFFAALARAPPSAACGDGPALAIALFNRMSRGVGPWMASPAGCTYSILMDCCCRAGRPDLVVAFFGRLLRLGLRLEVISFNNLLKGLCHAQRTNEALDVLLHRTPELDCVPDVFSYSIVINSCFKEGEVDKACNLFHEMIQLGVQPDVAIYTSIIDALSKAGAMDKAEVVLQQMVDQGIEPDVMTYTSLIHGYSGSGQWKAAVRVFKEMASAGVLPNAFTLNSFMDSLCKHRRTKEARVIFDSMAAKGQKLNIVSYSIMLNGYAKEGCFDDMTGLLNLMLQNGVVPNHHIFNILINAYAKRGLMDEAMHMFEVMRQQGVNPDVVDYLVIMDSLCKMGRMDAALDKFNQMVNQGVSPNKAIYQCLVLGSCSHGHFVKAKELISEAINRGLFSNSVFFYPVINDLCKEGKVKEAQDMFDFILGIGQRPDVIMYNSLMDGYCLVGKVEEAVRVLDAMKSAGLQPTAVTYAILLNGYCKIGRIADGLSLFREMSLSGVKPTTIMYNIILDGLFRSGRTVSAKEKFRTMSESGIPVGIGTYNIILHGFCRSNCTDEAIELFKKLCAMNVKIDVITLNTMISVMFKTRRIEEAKDLFATISAIGLVPSVVTYSVMMTNFIKEGLLAEADDMFLAMEKAGCAPDCRLLNHVVRVLLEKGAVVKAATYLAKLDAKELSLEASTVSLIVSLFSRRGKLREHVKLLPVKYQPPEILLGTSY

SEQ ID NO: 405 - protein, 761 aa, Triticum aestivum
MPRFSSTTSMSSLRLRLRLRLHACHSSSASQPSRSQGWDPHAAFAVATECARSGNLTPEGAHNLFDELLRQGNPVLGRPLNNLLAALARAPASSSCRDGPALAVALFSRISQGARLRVVHPTACTYSILMDCCCRARHLDLALAFFGRLLRTGLKAGAIEVNILLKSLCHAKRADEAMEVLLHRMPELGCTPDSVAYNTVIHGFFKEGQVGRAMDKAEYFLREMVDNGVIPNNVTYNSLIHGYSSSGYQKEAVRVLKEMTSQGIIPDVFTCNSLMASLSKNGRSKEAAEIYDSMAMKGLEPDIVSYNTRLHGYATEGCLVDMTNLFNSMTRDGIRPNCHTLNILINAYAKFGMMDEAMLIFKGMRKQGVSPDVVTYSTVIHAFCKMGSLDIAMDKFKQMTDMGVRPNPIVYHSLIQGFCTHGDLVKAKELVTEMRNKGMRPPDIKVFHLVMQNLCTEGRVTKARDILDLIVRIGMRPDVFIFNILIGGYCLVRKMADASKIFDDMVSYGLEPSNITYGILINGYCKNKRIDDGLILFKTMLHKGLKPTTFNYNVILDGLFLAGRTVAAKEKFNEMVESGVSVCIDTCSIVLGGLCKNNCSSEAITLLRKLSTMNVKFDITIVNIIIGAFYRVKRNQEAKDLFAAIPANGLVPNAVTYTIMMTNLIKEGSVEEADNLFLSMEKSGSTANSWMLNHIIRRLLERGEIVKAGNYMSKVDVKSYSLEAKTVSLLISLFSREGKYRDHIKLLPTKYQFLEEAATVE

SEQ ID NO: 406 - protein, 363 aa, Triticum aestivum
MVDMGVRPNAIVYHSLIRGFCTHGDLVKAKELVTEMRNKAMRPPHIKFFHSIMQNLCTEGRVIEARDILDLMLHIGMRPDVPIFNLLIGGYCLVREMEDATKMFDDMVSYGLEPCNNTYGILINGYCKNRRIDDGLILFKEMLRKGLKPTTFNYNVILDGLFLAGRTVAAKVKFNEMVESGVSVCIDTYSIVLGGLCRNNCTGEAITLSKKLSTMNVKFNIAIVNILIGAFFRVRRNQEAKDLFAAIPANGLVPNAVTYTIMMTNLIKEGSVEEADTLFLSMEKSGCTANSCMLNHIIRRLLERGEIVKAGNYMSKVDAKSYSLEAKTVSLLISLLSGKGKYREHIKLLPMKYQFLEEAATVE

SEQ ID NO: 407 - protein, 759 aa, Triticum aestivum
MNIRTTRLHYIPTRLAPEFTAYSPRPMPGFSYAASMSPLRLRLHARHSASASQPSRSQGWDPHAALAVATVALFSRISQGALRRVAHPTACTYSILMDCCCRAHRPDMALAFFGRLLRTGLEADQVVFSTLLKGLCHAKRSDEALDVLLHRMPELGCTTHVVAYNTVIHGFFREGQVGKACDIFHGMAQQGVAPNVVTYNSVIDALCKARAMDKAEYFLGQMVDSGVVPNNVTYNSLIHGYSSSGHSKEAVRVLKQMTSKGIIPDVFTCNLLMASLCNNRRSKEAAELFDSMAMKGLKPNTVSYAILLHRYATEGCLVDMINLFNSMATDCILPNCRIFNILINAYAKSGKLDKAMLIFKEMHKRGVSPDVVTYSTVIHAFCKMGSLDIAMDKFNQMVDMGVRPNATVYHSLIQGFCTHGDLVKAKELVTEMRNKAMRPPDIKFFHSIMQNLCTEGRVIEARDILDLMLHIGMRPDVPIFNLLIGGYCLVREMEDATKMFDDMVSYGLEPCNNTYGILINGYCKNRRIDDGLILFKEMLRKGLKPTTFNYNVILDGLFLAGRTVAAKVKFNEMVESGVSVCIDTYSIVLGGLCRNNCTGEAITLSKKLSTMNVKFNIAIVNILIGAFFRVRRNQEAKDLFAAIPANGLVPNAVTYTIMMTNLIKEGSVEEADNLFLSMEKSGCSANSYMLNHIIRRLLEKGEMVKAGNYMSKVDAKSYSLEAKTVSLLISLFSRKGKYREHIKLLPTKYQFLEEAATVE

SEQ ID NO: 408 - protein, 363 aa, Triticum aestivum; identical to SEQ ID NO: 406

SEQ ID NO: 409 - protein, 759 aa, Triticum aestivum
MNIRTTRLHYIPTRLAPEFTAYSPRPMPGFSYAASMSPLRLRLHARHSASASQPSRSQGWDPHAALAVATVALFSRISQGALRRVAHPTACTYSILMDCCCRAHRPDMALAFFGRLLRTGLEADQVVFSTLLKGLCHAKRSDEALDVLLHRMPELGCTTHVVAYNTVIHGFFREGQVGKACDIFHGMAQQGVAPNVVTYNSVIDALCKARAMDKAEYFLGQMVDSGVVPNNVTYNSLIHGYSSSGHSKEAVRVLKQMTSKGIIPDVFTCNLLMASLCNNRRSKEAAELFDSMAMKGLKPNTVSYAILLHGYATEGCLVDMINLFNSMATDCILPNCRIFNILINAYAKSGKLDKAMLIFKEMHKRGVSPDVVTYSTVIHAFCKMGSLDIAMDKFNQMVDMGVRPNATVYHSLIQGFCTHGDLVKAKELVTEMRNKAMRPPDIKFFHSIMQNLCTEGRVIEARDILDLMLHIGMRPDVPIFNLLIGGYCLVREMEDATKMFDDMVSYGLEPCNNTYGILINGYCKNRRIDDGLILFKEMLRKGLKPTTFNYNVILDGLFLAGRTVAAKVKFNEMVESGVSVCIDTYSIVLGGLCRNNCTGEAITLSKKLSTMNVKFNIAIVNILIGAFFRVRRNQEAKDLFAAIPANGLVPNAVTYTIMMTNLIKEGSVEEADNLFLSMEKSGCSANSYMLNHIIRRLLEKGEMVKAGNYMSKVDAKSYSLEAKTVSLLISLFSRKGKYREHIKLLPTKYQFLEEAATVE

SEQ ID NO: 410 - protein, 569 aa, Triticum aestivum
MINLGVQPDAVTYSSFINALSKSGVMDKAEVVLRQMVDQGIVPNIITYTSLIHGYSTSGQWKAAVRIFKEMTSTGVRPNSVTLNSFIDSLCKHRKTKEARDIFDSMAANGHKPDIFSYSTLLNGYVKEGCFDDMTDLFNSMVWNGIVPNHHVFNILINAYAKRGLMDKAMHMFEVMRQQGVNPDVFSYQIVMDSLCKMGRMDAALDKFNQMVNQGVSPNKAVYQCLVLGSCSHGHFVKAKELISEAINRGLYSNSVFFYRVINDLCKEGKVNEAQDMFDFILGIGQRPDVIMYTSLMDGYCLVGEVEKALSVLDAMKSAGLQPDDVVYGTLLNGYCKIGRIADGLSLFREMSLSVVKPTTIIYNIILDGLFCSGRTVCAKEKFDMMIESGIPVGVDTYNIVLHGLCRNNCTDEAIELFKKLRAMNVKINVITLNTMISALFKTRRIEEAKDLFATISAIGLVPSVVTYSVMMTNFIKEGLLADADDMFSAMEKAGCAPNSRLLNQVVRVFLKNGEVVKAVTYLAKLDAKQLSLEASTVSLIVSLFSRKGKLRKHVKLLPVKYQPPEMLD

SEQ ID NO: 411 - protein, 772 aa, Triticum aestivum
MPTARLCSISASSFKASSGKPRAPVAALAAATERVRAGTLNQEDAHHLFDELLSQAAAFPVGGLNNFLATLARARPSAACSNGPALAVALFNRMSRGPGARVVSPTCCTYSILMDCCCRAGRPDLVLAFFCRLLRLGLSLNVTSFNNLLKGLCQSKRTNEALDVLLQRTPELDCAPDVVSYNIVINGCLKQGEVEKACNLYREMINLGVQPDAVTYSSFINTLSKSGAMDKAEVVLRQMVDQGIVPNIITYTSLIHGYSTSGQWKAAVRIFKEMTSTGVRPNSVTLNSFIDSLCKHRKTKEARDIFDSMAANGHKPDIFSYSTLLNGYVKEGCFDDMTDLFNSMVQNGIVPNHHVFNILINAYAKRGLMDKAMHMFEVMRQQGVNPDVFSYQIVMDSLCKMGRMDAALDKFNQMVNQGVSPNKAVYQCLVLGSCSHGHFVKAKELISEAINRGLYSNSVFFYRVINDLCKEGKVNEAQDMFDFILGIGQRPDVIMYTSLMDGYCLVGEVEKALSVLDAMKSAGLQPDDVVYGTLLNGYCKIGRIADGLSLFREMSLSVVKPATIIYNIILDGLFCSGRTVCAKEKFDMMIESGIPVGVDTYNIVLHGLCRNNCTDEAIELFKKLRAMNVKINVITLNTMISALFKTRRIEEAKDLFATISAIGLVPSVVTYSVMMTNFIKEGLLADADDMFSAMEKAGCAPNSRLLNQVVRVFLKNGEVVKAVTYLAKLDAKQLSLEASTVSLIVSLFSRKGKLRKHVKLLPVKYQPPEMLD

SEQ ID NO: 412 - protein, 772 aa, Triticum aestivum; identical to SEQ ID NO: 411

SEQ ID NO: 413 - protein, 772 aa, Triticum aestivum
MPTARLCSISASSFKASSGKPRAPVAALAAATERVRAGTLNQEGAHHLFDELLSQAAAFPVGGLNNFLATLARARPSAACSNGPALAVALFNCMSRGPGARVVSPTCCTYSILMDCCCRAGRPDLVLAFFCRLLRLGLSLNVTSFNNLLKGLCQSKRTNEALDVLLQRTPELDCAPDVVSYNIVINGCLKQGEVEKACNLYREMINLGVQPDAVTYSSFINALSKSGAMDKAEVVLRQMVDQGIVPNIITYTSLIHGYSTSGEWKAAVRIFKEMTSAGVRPNSVTLNSFIDSLCKHIKTKEARDIFDSMAANGHKPDIFSYSTLLNGYVKEGCFDDMTDLFNSMVRNGIVPNHHVFNILINAYAKRGLMDKAMHMFEVMRQQGVNPDVFSYQIVMDSLCKMGRMDAALDKFNQMVNQGVSPNKAVYQCLVLGSCSHGHFVKAKELISEAINRGLYSNSVFFYRVINDLCKEGKVNEAQDMFDFILGIGQRPDVIMYTSLMDGYCLVGEVEKALSVLDAMKSAGLQPDDVVYGTLLNGYCKIGRIADGLSLFREMSLSVVKPTTIIYNIILDGLFCSGRTVCAKEKFDMMIESGIPVGVDTYNIVLHGLCRNNCTDEAIELFKKLRAMNVKINVITLNTMISALFKTRRIEEAKDLFATISAIGLVPSVVTYSVMMTNFIKEGLLADADDMFSAMEKAGCAPNSRLLNQVVRVFLKNGEVVKAVTYLAKLDAKQLSLEASTVSLIVSLFSRKGKLRKHVKLLPVKYQPPEMLD

SEQ ID NO: 414 - protein, 772 aa, Triticum aestivum; identical to SEQ ID NO: 413

SEQ ID NO: 415 - protein, 753 aa, Triticum aestivum
  misc_feature (207)..(207): Xaa can be any naturally occurring amino acid
MPRFSSTTSMSSLRLRLHARHSSSASQPSHSQGWDPHAAFAAATERARSGKLTPKDAHHLFDELLRQANPVQERPLNNLLSALARAPASAACRNGPALAVNLFVRISQGARRRVAHPTACTYGILMDCCCRAHRLDLAFAFFGRLLRTGLKAGVIQVCTLLKGLCRAKRADEALDVLLHRMPELGCTPDVVAYTTVIHGFFKEGQVXKACNLFHEMALQGVTPDVVTYNSVIDALCKARAMDKAEYFLRQMIGNGVVPNNVTYNSLIHGYSSSGHWKEAVRVLKEMTSQGIIPDIVSYRILLHGYATEGCLVDMINLFNSMARYCILPDCHIFNILINAYAKSGKLDKAMLIFKEMQKQGVSPNAVTYSTVIDAFCKKGQLDDAMIKFNQMIDTGVPQGTAVYGSLIQGFCTHGNLVKAKELLTEMMNKGIPPPDIKFFHSIMQNLCTEGRVIEARDVLGLIAHIGMRPNVCTFNILIGGYCLVGKMEDASKIFDDMMSYGLEPSNITYAILINGYCKNERINDGLILFKEMLRKGLKPTTFNYNVILDGLFLAGRTVAAKEKFDEMVEFGVSVRIDTYSIVLGGLCRNNCNGEAITLFQKLSTMDVKFNITIVNIMIDAFYRVQRNQEAKDLFAAVSANGLVANVFTYTIMMKNLIKEGSVEEADDLFLSMEKSGCTADSYMLNLIVRMLLEKGELVKAGNYMSKVDAKSYSLEAETVSLLISLFSGKGKYREHIGLLPTKYQFREEAATVE

SEQ ID NO: 416 - protein, 753 aa, Triticum aestivum
MPRFSSTTSMSSLRLRLHARHSSSASQPSHSQGWDPHAAFAAATERARSGKLTPKDAHHLFDELLRQANPVQERPLNNLLSDLARAPASAACRNGPALAVNLFVRISQGARRRVAHPTACTYGILMDCCCRAHRLDLAFAFFGRLLRTGLKAGVIQVCTLLKGLCRAKRADEALDVLLHRMPELGCTPDVVAYTTVIHGFFKEGQVGKACNLFHEMALQGVTPDVVTYNSVIDALCKARAMDKAEYFLRQMIGNGVVPNNVTYNSLIHGYSSSGHWKEAVRVLKEMTSQGIIPDIVSYRILLHGYATEGCLVDMINLFNSMARYCILPDCHIFNILINAYAKSGKLDKAMLIFKEMQKQGVSPNAVTYSTVIDAFCKKGQLDDAMIKFNQMIDTGVPQGTAVYGSLIQGFCTHGNLVKAKELLTEMMNKGIPPPDIKFFHSIMQNLCTEGRVIEARDVLGLIAHIGMRPNVCTFNILIGGYCLVGKMEDASKIFDDMMSYGLEPSNITYGILINGYCKNERINDGLILFKEMLRKGLKPTTFNYNVILDGLFLAGRTVAAKEKFNEMVEFGVSVRIDTYSIVLGGLCRNNCSDEAITLFQKLSTMDVKFNITIVNIMIDAFYRVQRNQEAKDLFAAVSANGLVADVFTYTIMMKNLIKEGSVEEADDLFLSMEKSGCTADSYMLNLIVRMLLEKGELVKAGNYMSKVDAKSYSLEAETVSLLISLFSGKGKYREHIGLLPTKYKFREEAATVE

SEQ ID NO: 417 - protein, 330 aa, Triticum aestivum
MPAARLSSISTSSFRAPSRAPLAALAAATERVRAGTLSQEDAHHLFDQLLGQAAAVPERGLNNFLAALARAPPSAACRDGPGLAIALFNRMSRGAGARVASPTLCTYSILMDCCCRAGRPDLVLAFFGRLLRLGLRLDIISSSNLLKGLCQAKRSNEALDMLLHRMPELDCVPDVFSYSIVINGCFKQGEVDKACNLFHQMPQLGVQPNVVIYNSVIDALSKSGAMDKAEVVLRQMVDQGIEPNIKTYNCLIHGYSTFGQWKEALRVFKEMASLGVVPDVVTLTSLIDSLCKHRRTKEAREIFDSMAAKGLPGSGFLLSWSFCESQGFDL

SEQ ID NO: 418 - protein, 330 aa, Triticum aestivum; identical to SEQ ID NO: 417

SEQ ID NO: 419 - protein, 330 aa, Triticum aestivum
MPAARLSSISTSSFRAPSRAPLAALAAATERVRAGTLSQEDAHHLFDQLLGQAAAVPERGLNNFLAALARAPPSAACRDGPGLAIALFNRMSRGAGARVASPTLCTYSILMDCCCRAGRPDLVLAFFGRLLRLGLRLDIISSSNLLKGLCQAKRSNEALDMLLHRMPELDCVPDVFSHSIVINGCFKQGEVDKACNLFHQMPQLGVQPNVVIYNSVIDALSKSGAMDKAEVVLRQMVDQGIEPNIKTYNCLIHGYSTFGQWKEALRVFKEMASLGVVPDVVTLTSLIDSLCKHRRTKEAREIFDSMAAKGLPGSGFLLSWSFCESQGIDL

SEQ ID NO: 420 - protein, 779 aa, Triticum aestivum
MFINFANFYQIHELFRQIHKKIQIDGKKFNFANFFQIVNFLLNSWTFFFLQVHGIDAPAARALVATWWQKFAGLQLTREENVMHPSDPIFGAPWGSRNSIDKSAAHLMGVSITRKDSSENHQVPLYPKHTPPPPPDSSAAYEAAHRRASPPVPPPAFTSSAAALVAARAPSVAGDTNRSRCASSADARTSRVELGWNRPEMPAARLSSISTSSFRAPSRAPLAALAAATERVRAGTLSQEDAHHLFDQLLGQAAAVPERGLNNFLAALARAPPSAACRDGPGLAIALFNRMSRGAGARVASPTLCTYSILMDCCCRVGRPDLVLAFFGRLLRLGLRLDIISSSNLLKGLCQAKRSNEALDMLLHRMPELDCVPDVFSYSIVINGCFKQGEVDKACNLFHQMPQLGVQPNVVIYNSVIDALSKSGAMDKAEVVLRQMVDQGIEPNIKTYNCLIHGYSTFGQWKEALRVFKEMASLGVVPDVVTLTSLIDSLCKHRRTKEAREIFDSMAAKGLKPNIVSYSTMLNGYVKEGSFEDMTDLFNSMVRNGVVPNHHIFNILINAYAKRGLMDEAMHMFEVMRQQGVNPDVVDYLVIMDSLCKMGRMDAAVDKFNQMVNQGVSPNKAVYQCLVLGSCSHGHFVKAKDLISEAINRGLFSNSVFFYPVINDLCKEGKVNEAQDMFDFILGIGRRPDVIMYNSLMDGYCLVGKVEEALRVLDAMKSAGLQPTAVTYAILLNGYCKIGRIADGLSLFREMSLSGVKPTTFINNNNNNKAFSPKQVGVG

SEQ ID NO: 421 - protein, 765 aa, Triticum aestivum
MPTARLSSISTSSFRAPLAALAAATERVLAGTLSREDAHHLFDELLGQAAAAPEHGLNNFLAALARAPPSAACSDGPGLAIALFNRMSRGAGARVVSPTLCTYSILMDCCCRARRPELVVAFFGRLLRLGLRLDIISSSNLLKGLCQAKRSNEALDMLLHRMPELDCAPDVFSFNIVINGCFKEGEVDKACNLFHEMPQLGVQPDVVTYTSIINALSKSGAMDKAEVVLRQMVDQGIGPNIRTYTSLIHGYSASGQWKAAARVFKEMVSLGVLPNVVTWNSFMDSLCKHRRTKEARDIFDSMAAKGQKPDIVSYSIMLNGYAKEGYFDDMTDLFNSMLQNGIVPNHHVFNILINAYAKRGLMDEAMHMFEVMRQQGVNPNVVSYQVIMDSLCKMGRMDAALEKFNQMVNQGVSADKAVYRCLVLGSCSHGDFVKAKELISEAVNRGLCSNSVFFYSVINDLCKEGKVKEAQDMFHFIVGIGQRPDVIMYTSLMDGYCLVGKVEEALRVLDAMKSAGLQPTAVTYAILLNGYCKIGRIADGLSLFKEMSLSGVKPTTIMYNIILDGLFRSGRTVSAKEKFCTMSESGIPVGIDTYNIVLSGLCKNNCTGEAIELFKKLRAMNVKIDVITLNIMISAMFKTRRIEEAKDLFATISAIGLVPSVVTYSLMMTNFIKEGLLAEADDMFLAVEKANCAPNSRLLNHVVRVLLEKGAVVKGANYLAKLDAKQMSLDVSTISLIVSLFSGEGKLREHVKLLPVKYQPPENSG

SEQ ID NO: 422 - protein, 765 aa, Triticum aestivum
MPTARLSSISTSSFRAPLAALAAATERVRAGTLSREDAHHLFDELLGQAAAAPEHGLNNFLAALARAPPSSACSDGPGLAIALFNRMSRGAGARVVSPTLCTYSILMDCCCRARRPELVVAFFGRLLRLGLRLDIISSSNLLKGLCQAKRSNEALDMLLHRMPELDCAPDVFSFNIVINGCFKEGEADKACNLFHEMPQLGVQPDVVTYTSIINALSKSGAMDKAEVVLRQMVDQGIGPNIRTYTSLIHGYSASGQWKAAARVFKEMVSLGVLPNVVTWNSFMDSLCKHRRTKEARDIFDSMAAKGQKPDIVSYSIMLNGYAKEGYFDDMTDLFNSMLQNGIVPNHHVFNILINAYAKRGLMDEAMHMFKVMRQQGVNPNVVSYQVIMDSLCKMGRMDAALDKFNQMVNQGVSPDKAVYRCLVLGSCSHGDFVKAKELISEAVNRGLCSNSVFFYSVINDLCKEGKVKEAQDMFHFIVGIGQRPDVIMYTSLMDGYCLVGKVEEALRVLDAMKSAGLQPTAVTYAILLNGYCKIGRIADGLSLFKEMSLSGVKSTTIMYNIILDGLFRSGRTVSAKEKFCTMSESGIPVGIDTHNIVLSGLCKNNCTGEAIELFKKLRAMNVKIDVITLNIMISAMFKTRRIEEAKDLFATISAIGLVPSVVTYSLMMTNFIKEGLLAEADDMFLAVEKANCAPNSRLLNHVVRVLLEKGAVVKGANYLAKLDAKQMSLDVSTISLIASLFSGEGKLREHVKLLPVKYQPPENSG

SEQ ID NO: 423 - protein, 571 aa, Triticum aestivum
MPQLGVQPDVVTYNSIIDALSKSGAMDKAEVLLRQMVDQGIEPNIRTYSCLIHGYSTFGQWKEALRVFKEMASLGVAPDVVTLSSLIDSLCKHRRTKQAREIFDSMAAKGLKPDIVSYSTMLNGYVKEGSFEDMTDLFNSMVRNGIVPNHHVFNILINAYARRGLMDEAMHMFEVMRQQGVNPDVVSYLVVMDSLCKMGRMDAALDKFNQMVNQGVSPNKAVYQCLVLGSFSHGDFVKAKELISEAVNRGMCSNSVFFYPVINDLCKEGKVKEAQDMFDFILGIGQRPDVIMYTSLMDGYCLVGKVEKALSVLDAMKSAGLQPDDVVYATLLNGYCKIGRIADGLSLFREMSLSGVKPTTIIYNIILDGLFCSGRTGFAKEKFHTMTESGIPVGVDTYNIVLSGLCRNNCTDEAIELFKKLRATNVKIDVMTLNIMISAMFKTRRIEEAKDLFATISAIGLVPSVVTYSLMMTNFIKEGLLADADDTFLVMEKAGCAPNSSLLNQVVRVLLEKGAVVKAATYLAKLDAKQLSVEASTISLIVSLFSGEGKLREHVELLPVKYQPPQSSADN

SEQ ID NO: 424 - protein, 715 aa, Triticum aestivum
MSRRVVPVGRRILEQNIKGRYRTGHIGTVDALHLFDELLQVAQPSSIAAINCLLTVFGRDCPALGVSLFNRVARTKVPLQSVTYGILVNCCCGAGRLDLGFAAMGNIIKMGFMKESVVAFSHLLKAICAENKTSYAMDIVLRVMPELNCTPNIFSYSILFKGLCNDKRSQEALDLIHIMVEHGGSCQPNVVSYSTVIDGLLKEGEVNKAYSLFCEMLQRGISPDVVTCSSIISGMCKLHAMDKAEDVLQQMLDRGILPDVATYTSLMHGYYSLGQCEEVDRIFKEMSRNGVQPDIVTYNIQMDYLCKSGRCAEARKIFDSMVSLGQKPDVTTYNVLLHGYAMERSFHDMNCLIELMDDNGISPDHYGYNILISAYAKEKMVDEVMHIFTKMRQQGLNPDVANYGAAVNLLSKIGRMDDAMSQFNQMITEGLAPDIIVFTPLISGFCSCGKWEKVDELFSEMLDRGICPNTVFFNTIMDRLCKNGRVMEAQDLFDLMVHMGVKPDVCTYNTLIGGYLFVGKMDEVSKLLDNMVSIGMEPDVITYNILIDGYSKNGRIDDALVVFREMLDRKVKPCVITFNSMIGALLKCGRKAEAKDLFDGIWANGLVPDVITYSLMIQKLIEEGSLQESDDLFLSMEKNGCAADSRMLNSMVRSLLQKGEVPRAGTYLSKIDERRFTFEASTASLLAALASGGKSQEYKELLPEKYHYFLEQGTD

SEQ ID NO: 425 - protein, 715 aa, Triticum aestivum; identical to SEQ ID NO: 424

SEQ ID NO: 426 - protein, 715 aa, Triticum aestivum; identical to SEQ ID NO: 424

SEQ ID NO: 427 - protein, 741 aa, Triticum aestivum
MPRFSSTTPMSPPRLLLRLGARHSSSTSHPSRIWDPHAAFAAATQRARSGTLTTEDAHHLFDELLRQGNPVQERPLTNFLAALARAPASAFCSDGPALAVALFGRLSRGAGRRVAQPNVFTYGVLMDCCCRARRLDLAIAFFARLLKTGLEANQVIFCTLLKGLCHAKRSDEALDVVLHRMPELGCTPNVVAYTTVIHGFLKEGQVGKACNLFHGMAQQGVAPDVVTYNSVIDALCKARAMDKAEYFLCEMVDNGVVPNNVTYNSLIHGYSSLGHQKEAVRVLKEMTRQGIIPDVITCTSLMTFLCKNGKSKEAAEIFDSMPTKGLKHDAVSYAILLHGYATEGCLVDMINLFNSMDRDCILPNCHIFNILIYAYAKSGKLDKAMLIFRDMQKQGVSPDAVTYSTVIHAFCKKGRLDDAVIKFNQMIDTGVRPEASAYRSLIQGFCTHGDLVKAKEYVTEMMKKGMLPPDIMFFSSIMQKLCTEGRVIEARDILDLIVRIGMRPNVFIFNILIGGYCLVCKMEDATKMFEDMVSFGLEPCNITYGILINGYCKNRRIDDGLILFQEMLHKGLKPTTFNYNVILDGLFLAGRTVAAKEKFDEMVESGVSVCSDTYSIVLAGLCRNNCSSEVIMLFQKLRAMNMKFNIRIVTIMIDAFYKVRRNQEAKDLFAAIPSNGLVANVVTYSIMMKSLIKEGSVEEADTLFIDGEERLYCKLLDVKSYYQKVTGKRRDSQGWKLYVES

SEQ ID NO: 428 - protein, 741 aa, Triticum aestivum; identical to SEQ ID NO: 427

SEQ ID NO: 429 - protein, 741 aa, Triticum aestivum
MPRFSTTTPMSPPRLLLRLGARHSSSTSHPSRIWDPHAAFAAATQRARSGTLTTEDAHHLFDELLRQGNPVQERPLTNFLAALARAPASAFCSDGPALAVALFGRLSRGAGRRVAQPNVFTYGVLMDCCCRARRLDLAIAFFARLLKTGLEANQVIFCTLLKGLCHAKRSDEALDVVLHRMPELGCTPNVVAYTTVIHGFLKEGQVGKACNLFHGMAQQGVAPDVVTYNSVIDALCKARAMDKAEYFLCEMVDNGVVPNNVTYNSLIHGYSSLGHQKEAVRVLKEMTRQGIIPDVITCTSLMTFLCKNGKSKEAAEIFDSMPTKGLKHDAVSYAILLHGYATEGCLVDMINLFNSMDRDCILPNCHIFNILIYAYAKSGKLDKAMLIFRDMQKQGVSPDAVTYSTVIHAFCKKGRLDDAVIKFNQMIDTGVRPEASAYRSLIQGFCTHGDLVKAKEYVTEMMKKGMLPPDIMFFSSIMQKLCTEGRVIEARDILDLIVRIGMRPNVFIFNILIGGYCLVCKMEDATKMFEDMVSFGLEPCNITYGILINGYCKNRRIDDGLILFQEMLHKGLKPTTFNYNVILDGLFLAGRTVAAKEKFDEMVESGVSVCSDTYSIVLAGLCRNNCSSEVIMLFQKLRAMNMKFNIRIVTIMIDAFYKVRRNQEAKDLFAAIPSNGLVANVVTYSIMMKSLIKEGSVEEADTLFIDGEERLYCKLLDVKSYYQKVTGKRRDSQGWKLYVES

SEQ ID NO: 430 - protein, 741 aa, Triticum aestivum; identical to SEQ ID NO: 429

SEQ ID NO: 431 - protein, 310 aa, Triticum aestivum
MPELGCTPDVVAYSTVIHGFFKEGQVGKACNLFHGMAQQGVAPDVVTYNSVIDALCKARAMDKAEYFLGQMVDSGVVPNNVTYNSLIHGYSSSGHSKEAVRVLKDMTSKGIIPDVFTCNSLMASLCKNGRSKEAAEIFNSMSMKGLKPNTISYAILLHGYATEGCLVDMINLFNSMATDCILPNCHIFNILINAYAKYGKLDKAMLIFKDMQKQGVSPDAVTYSTVIHAFCKKGRLDDAVIKFNQMIDTGVLLEASVYRSLIQGFCTHGDLVKATEYVTEMMKKGMLPPDIMFFSSIMQNLCTEGRVIEA

SEQ ID NO: 432 - protein, 715 aa, Triticum aestivum
MSRRLVPVGRRILEQNIKAWYHAGDIGTKDALHRFDELLQDAGSSSIRAVNYLLTVVGRDCPALGVSLFNRVARAKVAPNSITYTILVDCCCRAGRLDLGFAAMGHIIKMGFTADAIFSFSHLLKSICAEKKTSYAMDIVLRVMPELNCTPDIFSYSILFKGLCNEKRSQEALELIHIMVEDGGCCRPDVVSYSTVIDGLLKEGEVDKAYGLFCEMLQRGISPDDVTYNSIISGMCKVHAMDKAEEVLQQMFDRGILPDVATYNSLIHGYYSLGRCKEVDRIFKEMSRNGVQPDIVTYNIQMDYLCKNGRCTEARKIFDSIVSLGQKPTVTTYSILLHGYALERSFHEMHCLIDLMVGNGIAPDHFVYNILISAYAKEEMIGEVMHIFKKMRQHGLNPDVANYGAVVNLLSKIGRMDDAMSQFNQMITEGLAPDIIIFTPLISGFCSCGKWEKVHELFSEMLDRGICPNTVFFNTIMDRLCKNGRVMEAQDLFDLMVHMGVKPDVCTYNKLTGGYLFIGKMDEVSKLLDNMVSIGMEPDVITYNILIDGYSKNGKINDALVFFREMLEGKVKPSVIIFNIMIGVLLKCGRKEEAKDLFDGIWAKGLVPDVVTYSLMIQKLIEEGSLQESNDLFLSMEKNGCAADSRMLNAIVRSLLQKGEVPRAGTYLSKIDERRFTLEASTASLLTALVSGGKGQEYKELLPEKYHSFLEQGTD

SEQ ID NO: 433 - protein, 715 aa, Triticum aestivum; identical to SEQ ID NO: 432

SEQ ID NO: 434 - protein, 715 aa, Triticum aestivum; identical to SEQ ID NO: 432

SEQ ID NO: 435 - protein, 715 aa, Triticum aestivum; identical to SEQ ID NO: 432

SEQ ID NO: 436 - protein, 715 aa, Triticum aestivum; identical to SEQ ID NO: 432

SEQ ID NO: 437 - protein, 715 aa, Triticum aestivum; identical to SEQ ID NO: 432

SEQ ID NO: 438 - protein, 733 aa, Triticum aestivum
MRRRLVTVGRRILEQKIQDRHRAGDIGRRILEQNIKARYHAGDIGTEDALNLFDELIQVAQPSSIRAINCLLTVVGRDCPALGVSLFNRVARAKVPPHNITYGILVDCCCRAGRLDLGHAAMGHVIKLGFTAEAIINFSHLLKAICAVKKTSYAMDIVLRVMPEFNCTPNIFSYSILFKGLCNERRSQEALELINIMVEDGGSCQPDVVTYNTVIDGLLKEGEVDQAYSLFSEMLRQGVSPNVVTCNSIISGMCKLHAMDKAEEVLQQMLDRRILPDVATYNSLIHGYYSLGQCEEVDRIFKEMTTNGVQPDIVTYNIQMDYLCKNGRCAEARKIFDSMISLGQKPTVTTYNILLHGYAMERSFHDMNCLIELMDDNGISPDHYGYNILISAYAKEKMVDDVLHIFTKMRQQGLNPDVANYGAVINLLSSIGRMDDAMSQYNQMINEGLAPDIIVFNSLISGFYSCGKWEKVHELFSEMLDRGICPNTVFLNTIMDRLCKNERVMEAQDLFDLMVHMGVKPDVWTYNTLIGGYLFVGKMDEVRKLLDNMCSIGMEPDVVTYSILIDGYSKNGRIDDAFVVFKELLGGKVKPCVITFTIMIGALLKCGRKEEAKDLFDGIWANGLVPNVITYSLMIQNLIEEGSLQESDDLFLSMEKNGCAADSRMLNAIVRRLLQRGEMPRAGTYLSKIDEGSFTLEASTAGLLTALASGGKCQEYKGLLPEKYHSFLEQGTG

SEQ ID NO: 439 - protein, 733 aa, Triticum aestivum; identical to SEQ ID NO: 438

SEQ ID NO: 440 - protein, 715 aa, Triticum aestivum
MRRRLVPVGSRLSERNIEHRYRSRNIGTEDALNLFDELIQVAGPSSVRAINCLLTVVGRDCPAIGVSLFNRVARAKVPPHNITYGILVDCCCRAGRLDLGHAGMGHVIKLGFAAEAIVNFSHLLKAICAEKKTSYAMDIVLRIMPEFNCIPNIFSYSILLKGLCNEKRSQEALELIHMMIDHGGSCQPNVVSYSTVLDGLLKEGEVGKAYSLFCVMLQRGISPNAVTCTSIISGMCKVHAMDKAEEVLQQMTNRGILPNSATYNSLIHGYYSLGWCKEVDRILKEMSKNGVQPDIITSNIQLDYLCKSRRCAEARKIFDSMVSLGQKPDVTTYSILLHGYAMEKSFHDMLCLIDLMVGNGIAPNHYVYNILISAYAKEEMVDEVMHIFTKMRQKGLNPDAVSYGTVIDLLSRIGRMDDAMSQFAQIITEGLAPDIIVFNSLISGFCSCGKWEKVHELFSEMLDHGICPDRVFFNTVMDHLCKNGRVMEAQDVFDLMVHMGVKPFVRDYNTLIHGYCLVGKMDEGRKLLDNMFSIGLKPDDFTYSILIDGYSKKGRIDDALIIVREMLDGKVKPSIITFNIMIGALLKGGRKEEAKDLFDGIWAKGLVPDVVTYSLMIQKLIEEGSLQESDDLFISMEKNGCAADSQMLNAIVRSLLQKGEVPRAGTYLSKIDERRFTPEASTASLLTALVSEGKGQEYKELLPEKYHSFLEQGTD

SEQ ID NO: 441 - protein, 714 aa, Triticum aestivum
MRRRLVPVGSRLLERNIEHRYRSRNIGTEDALNLFDELIQVAGPSSVRAINYLTVVGRDCPAIGVSLFNRVARAKVPPHNITYGILVDCCCRAGRLDLGHAGMGHVIKLGFAAEAIVNFSHLLKAICAEKKTSYAMDIVLRIMPEFNCIPNIFSYSILLKGLCNEKRSQEALELIHMMIDHGGSCQPNVVSYSTVLDGLLKEGEVGKAYSLFCVMLQRGISPNAVTCTSIISGMCKVHVMDKAEEVLQQMTDRGILPNSATYNSLIHGYYSLGWCKEVDRILKEMSRNGVQPNVVTYNIQLDYLCKSRRCAEARKIFDSMVSLGQKPDVTTYSILLHGYAMEKSFHDMLCLIDLMVGNGIAPNHYVYNILISAYAKEEMVDEVMHIFTKMRQKGLNPDAVSYGTVIDLLSRIGRMDDAMSQFAQIITEGLAPDIIVFNSLISGFCSCGKWEKVHELFSEMLDRGICPDRVFFNTVMDHLCKNGRVMEAQDVFDLMVHMGVKPFVRDYNTLIHGYCLVGKMDEGRKLLDNMFSIGLKPDDFTYSILIDGYSKKGRIDDALIIVREMLDGKVKPSIITFNIMIGALLKGGRKEEAKDLFDGIWAKGLVPDVVTYSLMIQKLIEEGSLQESDDLFISMEKNGCAADSQMLNAIVRSLLQKGEVPRAGTYLSKIDERRFTPEASTASLLTALVSEGKGQEYKELLPEKYHSFLEQGTD

SEQ ID NO: 442 - protein, 714 aa, Triticum aestivum; identical to SEQ ID NO: 441

SEQ ID NO: 443 - protein, 715 aa, Triticum aestivum
MRRRLVPVGSRLLERNIEHRYRSRNIGTEDALNLFDELIQVAGPSSVRAINCLLTVVGRDCPAIGVSLFNRVARAKVPPHNITYGILVDCCCRAGRLDLGHAGMGHVIKLGFAAEAIVNFSHLLKAICAEKKTSYAMDIVLRIMPEFNCIPNIFSYSILLKGLCNEKRSQEALELIHMMIDHGGSCQPNVVSYSTVLDGLLKEGEVGKAYSLFCVMLQRGISPNAVTCTSIISGMWKVHAMDKAEEVLQQMTNRGILPNSATYNSLIHGYYSLGWCKEVDRILKEMSKNGVQPDIITYNIQLDYLCKSRRCAEARKIFYSMVSLGQKPDVTTYSILLHGYAMEKSFHDMLCLIDLMVGNGIAPNHYVYNILISAYAKEEMVDEVMHIFTKMRQKGLNPDAVSYGTVTDLLSRIGRMDDAMSQFAQIITEGLAPDIIVFNSLISGFCSCGKWEKVHELFSEMLDHGICPDRVFFNTVMDHLCKNGRVMEAQDVFDLMVHMGVKPFVRDYNTLIHGYCLVGKMDEGRKLLDNMFSIGLKPDDFTYSILIDGYSKKGRIDDALIIVREMLDGKVKPSIITFNIMIGALLKGGRKEEAKDLFDGIWAKGLVPDVVTYSLMIQKLIEEGSLQESDDLFISMEKNGCAADSQMLNAIVRSLLQKGEVPRAGTYLSKIDERRFTPEASTASLLTALVSEGKGQEYKELLPEKYHSFLEQGTD

SEQ ID NO: 444 - protein, 714 aa, Triticum aestivum; identical to SEQ ID NO: 441

SEQ ID NO: 445 - protein, 634 aa, Triticum aestivum
MPTARLSSVSASSFKASSRKPRAPLAALAAATERVRAGTLSQEDAHHLFDELLGQAAIVPERGLNNFLAALARAPPSGACGDGPTLAVTLFNRMSRGAGARVVSPTLCTYSILMDCCCRAGRPDLVVAFFGRLIRLGLRLEIISFSNLLKGLCQAKCSNEALDMLLHRMPELDCAPHVVSYNIVINGCFKQGEVEKACNLYREMINLGVQPNVVTYSSFINALSKSGAMDKAEVVLRQMVDQGIAPNIITYTSLIHGYSTSGQLKAAVSIFKEMASAGVRPNSVTLNSFIDSLCKHRKTKEARDIFDSMAAKGHKPDIFSYSTMLNGYAKEGCFDDMTDLFNSMVRNGIVPDHHVFNILINAYAKRGLMDKAMHMFEVMRQQGVNPNVVDYGILLNGYCKIGRIAHGLSLFREMSLSGVKPTTIMYNIILDGLFRSGRSVSAKEKFDMMLESGIPVNVRTYNIVLCGLCKNNCTGEAMELFKKLRAMNVQIDVMILNTMISAMFKTRRIEEAKDLFATISAIRLVPSVVTYSVMMTNFIKEGLLADADDMFLEMEKAGCAPNSSLLNQVVRALLEKGAVVKAATYLAKLDAKQLSVEASTILLIVSLFSGEGKLREHIELLPVKYQPPESSTDN

SEQ ID NO: 446 - protein, 729 aa, Triticum aestivum
MVPPSPSPSSTACAENKPARGWHLTVHTYGILMDCCCRASRPDLGLAFFGRLLRTGLKTNEIVASTFLKCLCYTKRTEEAGNLLLHRMPELCCVPDAFSYNIVLKSLCDNSMSQRGLDLLQMMAKEGGGCSPNVVAYSTVIHGFFKEGETGKACNLFHEMMQQGVVPNVWTYSSIIDALCKARAMDKAELALQQMVANGAQPNEVTYNCMIHGYSTSGRLKEAAKMFREMKSRGLTPNIVTCGSLMTSLCKHGRSKEAREIFDSMTAKGHRADVVSYSILLHGYANEGCFADMIDLFNSMESNGIAADCRVFTILIDAYAKRGMMDDAMHIFTEMQQQGVSPNVVTYSTVISALSRMGRLTDSMEKFNQMVALGVQPDRAIYRSLIQGFCMHGGLVKDKELVSQMINKGIPRPSIVFFNSVINSMCKEGRVMDAHDIFDLVIDIGERPDDITFNSLIDGYCLVGKMDKAFKILDAMESVGVQPNIVTYNTLLDGYFKNGRINDGLTLFREMPRKRIKPDTVTYGIMLDGLFRAGRTVAARTMFHEMIESGITVDIPTYNIVLRGLSRNNCTDEAIALFQKLGAMSVKFNISIFNTMIDAMYKVRRREEANDLFAAISASGLVPKESTYAVMIINLLKHGAVEEADNMFSSMEKTGIVPSSRLLNCIIRMLLEIGEIAKAGNYLSKLDGNSISLEASTTSLMLSLFSKKGKYHEDMKLLPAKYQFFDGCS

SEQ ID NO: 447 - protein, 716 aa, Triticum aestivum
MFSVFIFALVFYVHLAIALFNRMCREQSGPRVVPLTVHTYNILMDCCCRASRPDLGLAFFARLLRTGLKTNEITANTFLKCLCYARRTDEALNVLLHRMFELGCVPDAISYNIVLKSLCEDSMSQRALDLLQMMAKEGGGCSPNVVAYSTVIHGFFKEGETGKACNLFHEMMHQGVEPSVWTYSSIIDALCKARAMDKAELVLQQMVNKGVLPNNVTYNCMIHGYSTSGQWKEAAKLLREMKSRDLIPDIVTRNSFLASLCKHGRSKEAAEFLDSMTAKGHKPDIVSYRILFHGYASEGCFADMIDLFNSMESNGIAADCHVFNILISGYAKRGMTEEAMLIFTEMRGQGVSPDVVTYSIVIAALSRMGRLTDAIEKFNEMTALEVHPDTTVYHSLIQGCCIDGDLVKAKELMLEMMNGGILRPNIVFFNSVINSLCKEGRVMDAHDVLDLVIGIGERPDTITFSSLIDGYCLVGKTDKAFKILDAMESVGVEPDIVTYNTLLDGYFKNRRIDDALTLFREMPRKRIKPGTVTYGIMLDGLFRAGRTVAAKKMFHEMNGSGTTVDISTYAIILGGFCRNNCADEAITLFHKLGAMNVKFNIAIVNTMINAMYKVGRREEAKELFAGILARGLVPNESTYGVMIKNLLKDGAVEDANNVFSSMDKSGIVPSSRLINDIIRLLLEKGNEKNSALQNIARPFSKCYTSYSALIACYISK

SEQ ID NO: 448 - protein, 716 aa, Triticum aestivum
MFSVFIFALVFYVHLAIALFNRVCREQSGPRVVPLTVHTYNILMDCCCRASRPDLGLAFFARLLRTGLKTNEITANTFLKCLCYARRTDEALNVLLHRMSELGCVPDAISYNIVLKSLCEDSMSQRALDLLQMMAKEGGGCSPNVVAYSTVIHGFFKEGETGKACNLFHEMMHQGVEPSVWTYSSIIDALCKARAMDKAELVLQQMVNKGVLPNNVTYNCMIHGYSTSGQWKEAAKLLREMKSQDLIPDIVTRNSFLASLCKHGRSKEAAEFLDSMTAKGHKPDIVSYRILFHGYASEGCFADMIDLFNSMESNGIAADCHVFNILISGYAKRGMTEEAMLIFTEMRGQGVSPDVVTYSIVIAALSRMGRLTDAIEKFDEMTALEVHPDTTVYHSLIQGCCIDGDLVKAKELMLEMMNGGILRPTIVFFNSVINSLCKEGRVMDAHDVLDLVIGIGERPDTITFSSLIDGYCLVGKTDKAFKILDAMESVGVEPDIVTYNTLLDGYFKNRRIDDALTLFREMPRKRIKPGTVTYGIMLDGLFRAGRTVAAKKMFHEMNESGTTVDISTYAIILGGFCRNNCADEAITLFHKLGAMNVKFNIAIVNTMINAMYKVGRREEAKELFAGILARGLVPNESTYGVMIKNLLKDGAVEDANNVFSSMDKSGIVPSSRLINDIIKLLLEKGNEKNSALQNIARPFSKCYTSYSALIACYISK

SEQ ID NO: 449 - protein, 716 aa, Triticum aestivum; identical to SEQ ID NO: 447

SEQ ID NO: 450 - protein, 716 aa, Triticum aestivum; identical to SEQ ID NO: 447

SEQ ID NO: 451 - protein, 716 aa, Triticum aestivum; identical to SEQ ID NO: 448

SEQ ID NO: 452 - protein, 716 aa, Triticum aestivum; identical to SEQ ID NO: 447

SEQ ID NO: 453 - protein, 733 aa, Triticum aestivum
MSRLRHSTSTAPMFHLRLLRCRFSSIPISPPSRSWSPVTAFAAATERVSAGTLSPEDAHRLFDELLRQATPVPARSLNGLLTALSRAPDTGACRDGPALALALFNRTRREEAGSWVVPSTIFTYGILMNCCCRTRRPELGLAFFGRVLRMGLRTNVVVATTVLQCLCGAKRTDEAVDILLHRMSELGCVPDDFSYNIVLKSLCDDSRSQRALDLLRMWENERGVCSPNVYTYNTVIHGFFKEGEVSKACNLFHEMAQKGVPPNVVTYSLTIDALCKARAMDKAQLFLRQMIHKGVRPNNVTYNVMIHGYCTLGQWKEAGKMFREMTRQGLIPDIVTWTSFMASLCKHGRTKEAAEFFDSMTAKGHKPDLVMYHVLLHGYATEGCFADMINLFNSMATKGIVPDRQVFNILIDAHAKHGMMDEAMHIFTGMQGQGVCPDVGTYSTLISALCRMGRLADAMDNFSQMIGKGVQPNTVVYHSLIQGFSTHGDLRKAKELVYEMTNKGIPCPNIAFFSSIMDSLCKEGRVMDAHDIFHLVTDIGLKPNIITFNTLIDGHCLVGEMEKAFGVLDSMVSAGIEADVFTYNTLAYGYCRCGRIDDGLILFREMLQNKPKPTTITYNIILDGLFRAGRTFAAKKMFLEMIETGITVSISTYSIILGGLCRNNCSDEAITLFQKLGAMNVKFDIKILTTMINAMFKVWRREEANGLFAAISASGMVPNADRKSSKRRISGRS

SEQ ID NO: 454 - protein, 733 aa, Triticum aestivum; identical to SEQ ID NO: 453

SEQ ID NO: 455 - protein, 733 aa, Triticum aestivum; identical to SEQ ID NO: 453

SEQ ID NO: 456 - protein, 733 aa, Triticum aestivum; identical to SEQ ID NO: 453

SEQ ID NO: 457 - protein, 733 aa, Triticum aestivum; identical to SEQ ID NO: 453

SEQ ID NO: 458 - protein, 733 aa, Triticum aestivum; identical to SEQ ID NO: 453

SEQ ID NO: 459 - protein, 716 aa, Triticum aestivum
MSRRLVPVGRRILEQNIKDRYRTGHIGTEDALQLFDELLQVAQPSSIAAINCLLTVVGRDCPALGVSLFNRVARSKVAPSSITYAILVDCCCRAGRQDLGHTAMGHVIKMGFLADAIITFSHLLKAICAENKTSYAMDIVLRVMPMFNCVPSIFSYSILFKGLCNERRSQEALELINIMVEDGRGSCQPNVVSYTTVIDGLLKEGEVGKAYSLFCVMLQRGISPNVVTCTSIISGMCKVHAMDKAEEVLQQMTNRGILPNSATYNSLIHGYYSLGQCEEVDRILMEMSRNGVQPNVVTYNIQMDYLCKSGRCAEARKIFDSMISLGPKPTITTYNILLHGYAMEKSFHDMHSLIDLMVGNGIAPDHYVYNILISACAKEEMVSEVMHIFKKMRQHGLNPDVATYGAVVNLLCSMGRMDDAMYQYNQMITEGLAPDIIVFSTLISGFCTCGKWEKVHELFSEMLDRGICPNTVFFTTIMDRLCKNGRVMEAQDLFDLMVHMGVKPDVCTYNTLIGGFLFIGKMDEVRKLLDNMVSIGMKPDVITYNILIDGYCKNGRIDDALVVFREMLAGKVKPCIITFNIMLGALLKGGRKEEAKDLFDGIWAKGLVPTVVTYSLMIQKLIEEGSLQESDDLFLSMEKNGCPANSRMLNAIVRRLLQKGEMPRAGTYLSKIDERSFTIEASTASLLTALASVGKCQEYKGLLPEKYHSFLEQGTD

SEQ ID NO: 460 - protein, 716 aa, Triticum aestivum
MSRRLVPVGRRILEQNIKDRYRTGHIGTEDALQLFDELLQVAQPSSIAAINCLLTVVGRDCPALGVSLFNRVARSKVAPSSITYAILVDCCCRAGRQDLGHTAMGHVIKMGFLADAIITFSHLLKAICAENKTSYAMDIVLRVMPMFNCVPSIFSYSILFKGLCNERRSQEALELINIMVEDGRGSCQPNVVSYTTVIDGLLKEGEVGKAYSLFCVMLQRGISPNVVTCTSIISGMCKVHAMDKAEEVLQQMTNRGILPNSATYNSLIHGYYSLGQCEEVDRILMEMSRNGVQPNVVTYNIQMDYLCKSGRCAEARKIFDSMISLGPKPTITTYNILLHGYAMEKSFHDMHSLIDLMVGNGIAPDHYVYNILISACDKEEMVSEVMHIFKKMRQHGLNPDVATYGAVVNLLCSMGRMDDAMYQYNQMITEGLAPDIIVFSTLISGFCTCGKWEKVHELFSEMLDRGICPNTVFFTTIMDRLCKNGRVMEAQDLFDLMVHMGVKPDVCTYNTLIGGFLFIGKMDEVRKLLDNMVSIGMKPDVITYNILIDGYCKNGRIDDALVVFREMLAGKVKPCIITFNIMLGALLKGGRKEEAKDLFDGIWAKGLVPTVVTYSLMIQKLIEEGSLQESDDLFLSMEKNGCPANSRMLNAIVRRLLQKGEMPRAGTYLSKIDERSFTIEASTASLLTALASVGKCQEYKGLLPEKYHSFLEQGTD

SEQ ID NO: 461 - protein, 716 aa, Triticum aestivum; identical to SEQ ID NO: 460

SEQ ID NO: 462 - protein, 716 aa, Triticum aestivum; identical to SEQ ID NO: 460

SEQ ID NO: 463 - protein, 612 aa, Triticum aestivum
MGHVIKLGFTAEAIVNFSHLLKAICAVKKTSYAMDIVLRIMPEFNCIPNIFSYNILFKGLCNEKRSQEALDLIRIMVEHGGCCQPDVVTYNTVIDGLLKEGEVGKAYSLFCEMLRQGVSPDVVTCSSIISGMCKLHAMDKAEEVLQQMLDRRILPDVATYNSLIHGYYSLGQCEEVDRIFKEMTTNGVQPDIVTYNIQMDYLCKNGRCAEARKIFDSMISLGQKPTVTTYNILLHGYAMERSFHDMNCLIELMDDNGISPDHYGYNILISAYAKEKMVDDVLHIFTKMRQQGLNPDVANYGAVINLLSSIGRMDDAMSQYNQMINEGLLPGIILFSQLISGFCSCGKWEKVHELFSEMLDRGICPNTVFFNTIIDRLCKNGRVMEAQDLFDLMVHMGVKPDVCNYNTLIGGYLFIGKMDEVSKLLDNMCSIGLNPNVFTYGILIDGYSKNGSIGDALVVFREMLEGKVKPSIISFNIMIGALLKCGRKEEAKDLFDGIWANVLVPDVVTYRLMIHKLIEEGSLQESDDLFVSMEKDGCAADSRMLNAIVRRLLQKGEMPRAGTYLSKIDERRFTLEASTASLLTALVSGGKGQEYKELLPKKYQSFLEQGTD

SEQ ID NO: 464 - protein, 714 aa, Triticum aestivum
MSRRLVPVGRRILERKIEERYCAGDIGTDDALNLFYELIQVARPSSIRAINCLLTVVRRDCPALGVSLFNRVARAKVPPHNITYGILVDCCCRAGRLDLGHAAMGHVIKLGFAAQAVVNFSHLLKAICAEKKTSYAMDIVLRVIPMFNCVPDVFSYSILFKGLCNERRSQEALELIHIMVQHGGSCQPNVVSYSTVIDGLLKEGEMNKAYSLFCEMLQRGISPNVVTCSSIISGMCKLHAMDKAEEVLQQMLDRGILPNSTTYNGLIHGYYSLEQCEEVGRIFKEMSRNGVQPNIVTYNIQMDYLCKSGRCAEARKIFDSMVSLGQKPDVTTYGILLHGYAMERSFHDIHCLIDLMVGNGLSPNNYIYSILISACAKEKMVDEAMHIFTKMRQQGFNPDVVSYGMVIDLLSSIGRMDDAMSQFNQMITEGLAPDIIVFNPLISGFCSCGKWEKVHELFSEMLDRSICPDRVFFNTVMDHLCKSERVMEAQDVLDLMIHMGVKPVVRDYNRLIHGYFLVGKMDEGRKLLDNMCSIGLKPNVVTYNILIDGYSKNGRIDDALVVFRETLDNVKVSVITFTIMIGALLKCGRKEEAKDMFDGIWANGLVPDVVTYSLMIQKLIEEGSLQESDDLFISMEKNGCAADSRLLNAIVRSLLQKGEILRAGTYLSKIDERSFTLEASTASLLTALASGGKGQEYKELLPEKYHSFLEQGTD

SEQ ID NO: 465 - protein, 714 aa, Triticum aestivum; identical to SEQ ID NO: 464

SEQ ID NO: 466 - protein, 724 aa, Triticum aestivum
MGLGRQNPMGFVPVAIWSRTSPCSALSCLQRWPRPCRHPLQPHVPRRWCTRVVSPTCCTYSILMDCCCRADRPDLVVAFFGHLLRLGLRLNVISFNNLLKGLCQAKRSNEAVDLLLHRTPELDSVPNVFSYGIVINGCFKQGEVDKACNLFHEMIQLGVQPNVVIYTSIIDALSKCGAMDKAEVVLQQMVDQGIEPNIRTYTSLVHGYSASGQWKAAVRVFKEMVSVGILPNAFTLNSFMDSLCKHRRTKEARVIFDSMAAKGQKPNIVSYSTMLNGYAKEGCFDDMTCFLNLMLQNGVVPDHHVFNILINACAKRGLMDEAMHMFEVMRQQGVNPDVFGYQIIMDSLCKKGKMDAALEKFNQMVNEGVSPNKAVYQCLVLGSCSHDHFLKAKELISEAVNRGLCSNSAFFYPVINDLCKEGKVKEAQDMFDFIVGIGQRPDVIMYNSLMDGYCLVGKVEEALRVLDAMKSAGLQPTAVTYDILLNGYCKIGRIAAGLSLFMEMSLSGVKPTTIMYNIILDGLFRSGRTDSAKEKFRTMSESGIPVGIGTYNIVLSGLCKNNCTGEAIELFKKLRAMNVKIDVKTLTIMISAMFKSRRIEEAKELFATISAIGLVPSVVTYSVMMTNFIKEGSLAEADDMFLAMEKASCAPNSMLLNQVVRALLKKGAVVKAATYLAKLDAKQLSVEASMISLIVFLFSGEGKLREHVELLPVKYQPPESSADN

SEQ ID NO: 467 - protein, 715 aa, Triticum aestivum
MSRRVVPVGRRILEQNIKARYHAGDIGTEDALHLFDELLQDAGRSSIHAINCLLTVVGRDCPALGVSLFNRVARSKVAPSSITYAILVDCCCRAGRQDLGHTAMGHVIKMGFLADAIITFSHLLKAICAENKTSYAMDIVLRIMPEFNCMPNIFSYNILFKGLCNEKRSQEALELIQIMVEDGGCCRPDVVTYSTVIDGLLKEGEVGKAYSLFCEMLRQGVSPDIVTCSSIISGMCKLHAMDKADEVLQQMLDRRILPDVATYNSLVHGYYSLGQCEEVDRVLKEMSRNGVQPNIVTYNIQMDYLCKSGRCAEARKIFDFMIGLGQKPDVTTYSVLLHGYAMEKSFHEMHCLIDLMVGNGISPDHHVYNILISAYAKEEMVGEVLHIFTKMRQQGLNPNVVNYGAVINLLSSIGRMDDAMSQFSQMITEGLAPDVIVFNSLISGFCSCGKWEKVHELFSEMFDRGICPDTVFFNTVMDHLCKNGRVMEAQDVFDLMVHMGVKPFVRDYNTLIHGYCLVGKMDEGRKLLDNMFSIGSKPDDFTYSILIDGYSKKGRIDDALIVIKEMLDGKVKPSIITFNIMIGALLKGGRKEEAKDLFDGIWAKGLVPDVVTYSLMIQKLIEEGSLQESDDLFLSMEKNGCAADSRMLNAIVRSLLQKGEVPRAGTYLSKIDERRFTPEASTASLLTALVSGGKGQEYKELLPEKYHSFLEQGTG

SEQ ID NO: 468 - protein, 715 aa, Triticum aestivum; identical to SEQ ID NO: 467

SEQ ID NO: 469 - protein, 715 aa, Triticum aestivum
MNRRVVPVGRRILEQNIKARYHAGDIGTEDALHLFDELLQDAGRSSIHAINCLLTVVGRDCPALGVSLFNRVARSKVAPSSITYAILVDCCCRAGRQDLGHTAMGHVIKMGFLADAIITFSHLLKAICAENKTSYAMDIVLRIMPEFNCMPNIFSYNILFKGLCNEKRSQEALELIQIMVEDGGCCRPDVVTYSTVIDGLLKEGEVGKAYSLFCEMLRQGVSPDVVTCSSIISGMCKLHAMDKAEEVLQQMLDRRILPDVATYNSLVHGYYSLGQCEEVDRVLKEMSRNGVQPNIVTYNIQMDYLCKSGRCAEARKIFDFMIGLGQKPDVTTYSVLLHGYAMEKSFHEMHCLIDLMVGNGISPDHHVYNILISAYAKEEMVGEVLHIFTKMRQQGLNPNVVNYGAVINLLSSIGRMDDAMSQFSQMITEGLAPDVIVFNSLISGFCSCGKWEKVHELFSEMFDRSICPDTVFFNTVMDHLCKNGRVMEAQDVFDLMVHMGVKPFVRDYNILIHGYCLVGKMDEGRKLLDNMFSIGSKPDDFTYSILIDGYSKKGRIDDALIVIKEMLDGKVKPSIITFNIMIGALLKGGRKEEAKDLFDGIWAKGLVPDVVTYSLMIQKLIEEGSLQESDDLFLSMEKNGCAADSRMLNAIVRILLQKGEVPRAGTYLSKIDERRFTPEASTASLLTALVSGGKGQEYKELLPEKYHSFLEQGTG

SEQ ID NO: 470 - protein, 715 aa, Triticum aestivum
MSRRFVPVSRRILEQNIKAPYHAGDIGTEDALHLFDELLQVAGRSSIHAINCLLTVVCHDCPALGVSLFNRVARSKVAPCSITYAILVDCCCRAGRLDLGHTAMGHIIKMGFTADAMITFSHLLKAICAENKTSYAMDIVLRIMPMFNCVPNNFSYNILFKGLCNERRSQEALELIHMMVQHGGSCQPNVVSYNTVVDGLLKEGEVGKAYTLFSEMLRQGISPDVVTCRSIISGMCKVHAMDKAEEVLQQMLDRRILPDVATYNSLIHGYYLLGQCEEVDRIFKEMSRNGVQPNVVTYTIQMDYLCKSGRCAEARKIFDSMISLGQKPDVYTYSILLHGYAMEKSFHDMHCLIDLMVENGIAPDHHVYNILISACAQEEMVSDVMHIFTKMRQQGLNPNVANYGVVVNLLCSMGRMDDAMYQYNQMITEGLDPDIIVFSTLISGFCSCGAWERVHEIFSEMLNRGIYPDTVFFNIIMDHLCKEGRVMEAQDIFDLMVHMGVKPFVRDYNTLIHGYCLVGKMDEGRKLLDNMCSIGLKPDDFTYSILIDGYSMKGRIDDALIVVRELLDGKVGPSIITFNIMIVALLKGGRKEEAKDLFDGIWAKGLVPDVVTYSLMIQKLIEEGSLQESDDLFLSMEKNGCAADSRMLNAIVRSLLQKGDVPRAGTYLSKVDERSFTLEGSTATLLTALASGRKGQEYKGLLPEKYHSFLEQDTG

SEQ ID NO: 471 - protein, 715 aa, Triticum aestivum; identical to SEQ ID NO: 470

SEQ ID NO: 472 - protein, 600 aa, Triticum aestivum
MAGPKSHLLKAICAENKTSYAMDIVLRIMPMFNCVPNNFSYNILFKGLCNERRSQEALELIHMMVQHGGSCQPNVVSYNTVVDGLLKEGEVGKAYTLFSEMLRQGISPDVVTCRSIISGMCKVHAMDKAEEVLQQMLDRRILPDVATYNSLIHGYYLLGQCEEVDRIFKEMSRNGVQPNVVTYTIRMDYLCKSGRCAEARKIFDSMISLGQKPDVYTYSILLHGYAMEKSFHDMHCLIDLMVENGIAPDHHVYNILISACAQEEMVSDVMHIFTKMRQQGLNPNVANYGVVVNLLCSMGRMDDAMYQYNQMITEGLDPDIIVFSTLISGFCSCGAWERVHEIFSEMLNRGIYPDTVFFNIIMDHLCKEGRVMEAQDIFDLMVHMGVKPFVRDYNTLIHGYCLVGKMDEGRKLLDNMCSIGLKPDDFTYSILIDGYSMKGRIDDALIVVRELLDGKVGPSIITFNIMIVALLKGGRKEEAKDLFDGIWAKGLVPDVVTYSLMIQKLIEEGSLQESDDLFLSMEKNGCAADSRMLNAIVRSLLQKGDVPRAGTYLSKVDERSFTLEGSTATLLTALASGRKGQEYKGLLPEKYHSFLEQDTG

SEQ ID NO: 473 - protein, 715 aa, Triticum aestivum; identical to SEQ ID NO: 470

SEQ ID NO: 474 - protein, 715 aa, Triticum aestivum; identical to SEQ ID NO: 470

SEQ ID NO: 475 - protein, 715 aa, Triticum aestivum; identical to SEQ ID NO: 470

SEQ ID NO: 476 - protein, 715 aa, Triticum aestivum; identical to SEQ ID NO: 470

SEQ ID NO: 477 - protein, 715 aa, Triticum aestivum
MSRRFVPVGRRILEQNIKARYHAGDIGTEDALHLFDELLQVAGRSSIHAINCLLTVVGRDCPALGVSLFNRVARAKVAPCSITYAILVDCCCRTGRQDLGFAAMGHVIKMGFTADAMITFSHLLKAICAENKTSYAMDIVLRIMPMFNCIPDVFSYNILFKGLCNEKRSQEALELIQVMVEHGGRCQPDVVSYSTVIDGLLKEGLVGKVYILFCEMIQRGISPNAVTYNSIISGMCKVHAMDKAEQVLQQMPDRGILPNVATYTSLIHGYFSLGQCKEVDRIFKEMSRNGVQPNVVTYNIQMDYLCKNGRCAEARKIFDSMVSLGQKPTVTTYSILLHGYALERSFHEIHCLIDLMVGNGIAPNHFLYNILISAYAKEEMIGEVMHIFKKMRQHGLNPNVATYGAVVNLLSKIGRMDDAMSQFNQMITEGLAPDIIVFTLLISGFCSCGKWEKVDELFSEMLDRGICPNTVFFNIIMDCLCKNERVMEAQDLFDLMVHMGVKPDVCTYNTLIGGYLFIGKMDEVRKLLDNMVSIGLKPNVITYSILIDGYSKNGSIDDALVVSREMLAGKVKPCVITFNIMIGALLKCGRKAEAKDLFDGIWANGLVPDVITYSLMIQKLIEEGSLQESDDLFLSMEKNGCVADSHMLNAIVRSLLQKGEVPRAGTYLSKIDERRFTFEASTASLLVALASGRKSQEYKELLPEKYHYFLEEGTD

SEQ ID NO: 478 - protein, 415 aa, Triticum aestivum
MSRRFPPGAMSRRILERKIQDRYHAGHIGTHNALNLFDELIQVAGPSSVRAINCLLTVVGRDCPVLGVSLFNRVARAKVPPHNITYSILVDCCCRAGCLDLGHAAMGHVIKLGFTEAIVNFSHLLKAICAEKKTSYAMDIVLRIMPMFNCVPNIFSYSIVFKGLCNEKRSQEALELIQIMVEDGGCCRPDVVTYSTVIDGLLKEGEVDQAYNLFSEMLRQGVSPNVVTCSSIISGMCKAQSVDKAKEVLQQMFERGILPNITTYNSLIQGYYSLGRCKEVDQIFKEMTINGVQPDIITYNIQMDYLCKSGQCAEARKIFDSMISLGQNPTATTYSILLHGYAMEKSFHDMHCLIDLMVENGISPDHYVYNILISAYAKEEMVGEVMHIFTKMRQQGLNPDAVSYGTVIDLLSRIG

SEQ ID NO: 479 - protein, 415 aa, Triticum aestivum; identical to SEQ ID NO: 478

SEQ ID NO: 480 - protein, 717 aa, Triticum aestivum
MSRRFPPGAMSRRILERKIQDRYHAGHIGTHDALNLFDELIQVAGPSSVRAINCLLTVVGRDCPALGVSLFNRVARAKVPPHNITYSILVDCCCRAGRLDLGHAAMGHVIKLGFTEEAIVNFSHLLKAICAEKKTSYAMDIVLRIMPMFNCVPNIFSYSIVFKGLCNEKRSQEALELIQIMVEDGGCCRPDVVTYSTVIDGLLKEGEVDQAYNLFSEMLRQGVSPNVVTCSSIISGMCKAQSVDKAKEVLQQMFERGILPNITTYNSLIQGYYSLGRCKEVDQIFKEMTINGVQPDIITYNIQMDYLCKSGQCAEARKIFDSMISLGQNPTATTYSILLHGYAMEKSFHDMHCLIDLMVENGISPDHYVYNILISAYAKEEMVGEVMHIFTKMRQQGLNPDAVSYGTVIDLLSRIGRMDDAMSLFNQMITEGLAPGTIVFNHLISGFCTCGKWEKVHELFSEMLDRGICPDTVFFNTVMDRLCKNGRVTEAQDLFDLMVHMGVKPDVCTYNTLMGGYLFIGKMDEVSKLLENMCSIGLKLDVVTYSILIDGYSKNGRIDDALVVFREMMDGKVKPSVITFNIMIGALLKGGRKEEATDLFNGIWPKGLVPDVVTYSLMIQKLIEEGSLQESDDLFLSMEKNGCAADSRMLNAIVRSLLQKGEVPRAGSYLSKIDERSFTLEASTASLVTALASGGKGQEYKELLPEKYHSFLEHGTD

SEQ ID NO: 481 - protein, 415 aa, Triticum aestivum; identical to SEQ ID NO: 478

SEQ ID NO: 482 - protein, 614 aa, Triticum aestivum
MGHVIKLGFTEEAIVNFSHLLKAICAEKKTSYAMDIVLRIMPMFNCVPNIFSYSIVFKGLCNEKRSQEALELIQIMVEDGGCCRPDVVTYSTVIDGLLKEGEVDQAYNLFSEMLRQGVSPNVVTCSSIISGMCKAQSVDKAKEVLQQMFERGILPNITTYNSLIQGYYSLGRCKEVDQIFKEMTINGVQPDIITYNIQMDYLCKSGQCAEARKIFDSMISLGQNPTATTYSILLHGYAMEKSFHDMHCLIDLMVENGISPDHYVYNILISAYAKEEMVGEVMHIFTKMRQQGLNPDAVSYGTVIDLLSRIGRMDDAMSLFNQMITEGLAPGTIVFNHLISGFCTCGKWEKVHELFSEMLDRGICPDTVFFNTVMDRLCKNGRVTEAQDLFDLMVHMGVKPDVCTYNTLMGGYLFVGKMDEVSKLLDNMVSIGMEPDVITYSILIDGYSKNGRIDDALVVFREMLDTKGKPSVISFNIMIGALLKCGRKEEAKDLFDGIWANGLVPDVITYSLMIQKLIEEGSLQESDDLFLSTEKNGCAADSRRLNAIVRSLLQKGEIPRAGTYLSKIDERGFTLEASTASLLTALASGGKGQEYKELLPEKYHSFLEQGTLNF

SEQ ID NO: 483 - protein, 715 aa, Triticum aestivum
MSRRFVPVDRRILERNIKDRYHAGCIGTEDALHLFDELLQVAGPSSIPAINCLLTVVGRDCPALGVSLFNHVARAKVPPHNITYGILVDCCCRAGRLDLGHAAMGHVIKLGFTAEAIINFSHLLKAICAEKKTSYAMDIVLRIMPEFNCIPNIFSYNILFKGLCNEKRSQEALELIQIMVEDGGCCRPDVVTYSTVIDGLLKEDEVDQAYSLFSEMLRQGVSPNVVTCNSIISGMCKLHAMDKAEEVLQQMLDRRILPDVTTYTSLIHGYYSLGQCEEVDRVFIEMSRNGVQPNIITYSIQMDYLCKNGRCTEARKNFDFMISLGQKPTVTTYNIMLHGYAMERSFHDMNCLIDLMDDNGISPDHYGYNILIFAYAEEKMVDEVMHIFTKMRQQGLNPDAVSYGTVIDLLSRIDRMDDAMSQFNQMITEGLVPDIVVFNPLIRGFCSCGKWEKVDELFSEMLDRGICPNIVFFTTIMDRLCKNGRVMEAQDLFDLMVHMGVKPDVCTYNILIGGYLFIGKMDEVSKLLDNMVSIGMEPDVITYNILIDGYSKNGRIDDAFVVFREMLAGKVKPCIITFNIMLGALLKGGRKEEAKDLFDGIWAKGLVPTVVTYSLMIQKLIEEGSLQESDDLFVSMEKNGCAADSHIINAIVRSLFRKGEVPRAGTYLSKIDERSFTLEASTAILLTALASGGKGQEYKELLPEKYHSFLEQGTD

SEQ ID NO: 484 - protein, 715 aa, Triticum aestivum; identical to SEQ ID NO: 483

SEQ ID NO: 485 - protein, 715 aa, Triticum aestivum; identical to SEQ ID NO: 483

SEQ ID NO: 486 - protein, 715 aa, Triticum aestivum; identical to SEQ ID NO: 483

SEQ ID NO: 487 - protein, 715 aa, Triticum aestivum; identical to SEQ ID NO: 483

SEQ ID NO: 488 - protein, 715 aa, Triticum aestivum
MSRRFVPVDRRILERNIKDRYHAGCIGTEDALHLFDELLQVAGPSSIPVINCLLTVVGHDCPALGVSLFNHVARAKVPPHNITYGILVDCCCRAGRLDLGHAAMGHVIKLGFTAEAIINFSHLLKAICAEKKTSYAMDIVLRIMPEFNCIPNIFSYNILFKGLCNEKRSQEALELIQIMVEDGGCCRPDVVTYSTVIDGLLKEDEVDQAYSLFSEMLRQGVSPNVVTCNSIISGMCKLHAMDKAEEVLQQMLDRRILPDVTTYTSLIHGYYSLGQCEEVDRVFIEMSRNGVQPNIITYSIQMDYLCKNGRCTEARKIFDFMISLGQKPTVTTYNIMLHGYAMERSFHDMNCLIDLMDDNGISPDHYGYNILIFAYAEEKMVDEVMHIFTKMRQQGLNPDAVSYGTVIDLLSRIDRMDDAMSQFNQMITEGLVPDIVVFNPLIRGFCSCGKWEKVDELFSEMLDRGICPNIVFFTTIMDRLCKNGRVMEAQDLFDLMVHMGVKPDVCTYNILIGGYLFIGKMDEVSKLLDNMVSIGMEPDVITYNILIDGYSKNGRIDDAFVVFREMLAGKVKPCIITFNIMLGALLKGGRKEEAKDLFDGIWAKGLVPTVVTYSLMIQKLIEEGSLQESDDLFVSMEKNGCAADSHIINAIVRSLFRKGEVPRAGTYLSKIDERSFTLEASTAILLTALASGGKGQEYKELLPEKYHSFLEQGTD

SEQ ID NO: 489 - protein, 715 aa, Triticum aestivum; identical to SEQ ID NO: 483

SEQ ID NO: 490 - protein, 713 aa, Triticum aestivum
MSRRFPTVGRRILERKIQDRYRAGHIGTDDALNLFDELIQLAGPSSVRAINCLLTVVGRDCPALGIFLFNRVARAKVPPHNITYGILVDCCCRAGRLDLGHAAMGHVIKLGFAAEAIVNFSHLLKAICAEKKTSYAMEIVLRIMPMFNCVPNIFSYSILFKGLCNEKRSQEALELIHIMVDHGGSCQPNVVSYNTVVDGLLKEGEAGKAYSLFSEMLQREILPDVVTYNSIISGMCKVHAMDKAEEVLRQMFDRGILPDIATYTSLIHGYYSSGQCKEVERVFNEMSRNGVQPNMVTYNIQMDYLCKSGRCTEARKIFDSLIDLGQKLTVTTYSILLHGYALERSLHGMHCLIDLMVGNGISPDHHVYNILISVYAKEGMVGEVMHIFTKMRQQGLNPDVVNYGTVINLLCSIGRMDDAMLQFSQMITEGLAPNIIVFTPLISGFCTYGKWEKVHELFSEMFDRGIYPDTLFFTTVMDRLCKNERVMEAQDIFDLMGHMGVKPDVCTYNTLIGGYLFVGKMDEVRKLLDNMVSIGMEPDVITYSRLIDGYSKNGRIDDALVVFWEMLDGKVKPSVITFNIIIGALLQGGRKEEAKDLFDCIWAKGLVPDVVTYSLMIQKLIEEGSLQESDDLFISMEKNGCAADSRMLNAIVRSLLQKEEILRAGTYLSKIDERRFTLEASTASLLTALVSGGKGQEYKELLPENYSELLIEA

SEQ ID NO: 491 - protein, 691 aa, Triticum aestivum
MSRRAVPAGRRILEQNIKARYRAGNIGTEDALHLFDELLPVARPSSVPAINCLLIVVGRDCPALAVSLFNRIARTKVAPQNITYGILVDCCCLAGRLDLGFAAMGHIIKTGFAAGSVISFSHLLRAVCAEKKTSYGMDIVLRIMPELNCTPDVYSYSILFKGLCNEKRSQEALELIHVMVEHGGSCQPNLVSYSTVIDGLLKEGEVGKAYSLFCEMVHRGISPDIVTYNSIISGMCKVHAMDKAEKVLQQMFDREILPDTTTYTSLIHGYYSSGQCKEVERVFEHMSINGVQPNMITYNIQMDYLCKSGRCAEARKIFDSMVSLGQKPSVTTYSILLHGYAMEKSFHDMHCLIDLMVENGISPDHYVYNMLISACPKEEMFGEVMHIFTKMRQQGLNPNVANYGAVINLLSSAGKMDDAMCQFNQMITEGLAPDIVIFNTLISGFCTCGKWEKVHELFSEMLNRGIYPDIVSFTILMDRLCKSGRVIEAQDMFDLMVRIGVKPNIHTYGTLMHGYFFVRKVDEVRKLLGNMLSTGLKPDVFTYTILIDGYFKNGMIDDASAVFTEMLEKKVEPSVITYRTMRYGLLNSGRTVAATKLYLRMIDSGIHVDIAAYNIILRGLCKNNCVDGALRMFQHLSSTNYPLEVGTYNIMISALVKGGRKEEATDLFDDMLAKGLVPDAVMYSLIKKGVV

SEQ ID NO: 492 - protein, 691 aa, Triticum aestivum; identical to SEQ ID NO: 491

SEQ ID NO: 493 - protein, 691 aa, Triticum aestivum; identical to SEQ ID NO: 491

SEQ ID NO: 494 - protein, 691 aa, Triticum aestivum; identical to SEQ ID NO: 491

SEQ ID NO: 495 - protein, 691 aa, Triticum aestivum; identical to SEQ ID NO: 491

SEQ ID NO: 496 - protein, 691 aa, Triticum aestivum; identical to SEQ ID NO: 491

SEQ ID NO: 497 - protein, 663 aa, Triticum aestivum
MDCCCRANRQDLALAFFGRLLRTGLKAGVIEVNTLLKGLCRAKRADEALDILLHRMPELGCAPNVVAYTTVIHGFFKEGQVSKACNLFHEMALQGVTPDVVTYNSVIDALCKARAMDNAEYFLRQMVDNGVVPNNVTYSSLIHGYSSSGHWKEAVRVFKEMTGRRVTPDVHTYNMFMTFLCKHGRSKEAAGIFDTMAMKGLKPDNVSYAIRLHGYATEGCLVDMINLFNSMERDCILPDCHIFNILINAYAKSGKLDKAMLIFNEMQKQGVSPNAVTYSTIIHAFCKKGRLDDAVIKFNQMIDTGVRQGTAVYRSLIQGFCTHGDLVKAKELLTEMMNKGIPPPDIKFFHSIMQNLCTEGRVIEARDILGLIAHIGMRPNVCTFNILIGGYCLVGKMEDASKIFDDMMSYGLEPSNITYGILINGYCKNRRIDDGLILFKEMLRKGLKPTTFNYNVILDGLFLAGQTVAAKEKFDEMVESGVSVCIDTYSIVLGGLCRNSCSSEAITLFRKLSAMNVKFNITIVNTIIGAFYRVERNQEAKDLLAAIPASGLVPNVVTYTIMIKNLIKEGSVEEADNLFLSIEKSGCSANSYLLNHIIRRLLEKGETVKAGNYMSKVDAKSYSLEAKTVSLLISLFSRKGKYREHIKLLPTKYQFLEEAATVE

SEQ ID NO: 498 - protein, 267 aa, Triticum aestivum
MEDASKIFDDMMSYGLEPSNITYGILINGYCKNERINDGLILFKEMLRKGLKPTTFNYNIILDGLFLAGQTVAAKEKFDEMVESGVSVCIDTYSIVLGGLCRNSCSSEAITLFRKLSAMNVKFNITIVNTIIGAFYRVERNQEAKDLFAAIPASGLVPNVVTYTIMIKNLIKEGSVEEADNLFLSMEKSGCSANFYLLNHIIRRLLEKGEIVKAGNYMSKVDAKSYSLEAKTVSLLISLFSRKGKYREHIKLLPTKYQFLEEAATVE

SEQ ID NO: 499 - protein, 663 aa, Triticum aestivum
MDCCCRANRQDLALAFFGRLLRTGLKAGVIEVNTLLKGLCRAKRADEALDILLHRMPELGCAPNVVAYTTVIHGFFKEGQVSKACNLFHEMALQGVTPDVVTYNSVIDALCKARAMDKAEYFLRQMVDNGVVPNNVTYSSLIHGYSSSGHWKEAVRVFKEMTGRRVTPDVHTYNMFMTFLCKHGRSKEAAGIFDTMAMKGLKPDNVSYAIRLHGYATEGCLVDMINLFNSMERDCILPDCHIFDILINAYAKSGKLDKAMLIFNEMQKQGVSPNAVTYSTIIHAFCKKGRLDDAVIKFNQMIDTGVRQGTAVYRSLIQGFCTHGDLVKAKELLTEMMNKGIPPPDIKFFHSIMQNLCTEGRVIEARDILGLIAHIGMRPNVCTFNILIGGYCLVGKMEDASKIFDDMMSYGLEPSNITYGILINGYCKNRRIDDGLILFKEMLRKGLKPTTFNYNVILDGLFLAGQTVAAKEKFDEMVESGVSVCIDTYSIVLGGLCRNSCSSEAITLFRKLSAMNVKFNITIVNTIIGAFYRVERNQEAKDLFAAIPASGLVPNVVTYTIMIKNLIKEGSVEEADNLFLSIEKSGCSANSYLLNHIIRRLLEKGETVKAGNYMSKVDAKSYSLEAKTVSLLISLFSRKGKYREHIKLLPTKYQFLEEAATVE

SEQ ID NO: 500 - protein, 259 aa, Triticum aestivum
MNCCCRVCRPDLGFALFGRLLRRGLKTDDIVTNTLLKCLCCAKRTDEAVSVLLHRMSKLGCVPDVISYNTVLKSLCDNSSSQRALDLLQMMTKGGGCSPDVVTYNTVIHGFLQEGEVSKACDRYHEMVQQGVLHDVVTYNSILDALCKAGAMDKAELFLQQMADDDIRPNEVTYNAMIHGYSTLGQWKRATQMFREMTSRGLAPNIVTWSSLMTSLCKHGRSKEAAEIFIPWLQKATSLTSLRIVFCFTGMPLRDSLQI

SEQ ID NO: 501 - protein, 607 aa, Triticum aestivum
MMTKGGGCSPDVVTYNTVIHGFLQEGEVSKACDLYHEMVQQGVLHDVVTYNSILDALCKAGAMDKAELFLRQMVDDDIRPNEVTYNAMIHGYSTLGQWKKATQMFREMTSRGLAPNIVTWSSLMTSLCKHGRSKEAAEIFHSMAAKGHKPNIVTYRVLLHGYAAEGFFADMIDLFNSMANNGIVPDCHVFNILINAYAKCGMMDEAMSMLTEMRGQGVSPDVFTYATVIAALCRMGRLTDAMDNFNRMIGKGVQPSKVVYHSLIQGFCTHGNLVKVKELIFGMTDKGIPHPNIVFFSSIMHSLCNEGRVMDAHHIFDLVIDIGERPDLITFNTLIDGYCLVSKMEEALRLLDSMVSAGIKPNVITYNTLINGYCRSGRLDDGVILFREMLHTRVKPNTVTYNIILDGLFRAGRTVAAKKMFHEMIETGTAVSISTYSIVLGGLCRNNCTDEAITFFQKLVAMNVKSDIAILNTMIKAMYKVQRREEANDLFASLPAYGLVPNAATYRVMISNLLKEGSLEEADNMFSSMEKSGCAPSSRLVNDIIRKLLEKGEIVKAGNYMSKVDGKIISFEASTTSLLLSLFSEKGKYREQLQLLPAKYQLFEGVI

SEQ ID NO: 502 - protein, 465 aa, Triticum aestivum
MAAKGHKPNIVTYRVLLHGYAAEGFFADMIDLFNSIANNGIVPDCHVFNILINAYAKCGMMDEAMSMLTEMRGQGVSPDVFTYATVIAALCRMGRLTDVMDNFNRMIGKGVQPSKVVYHSLIQGFCTLGDLVKVKKLIFEITDKGIPHPNIVFFSSIMHSLCNEGRVMDAHHIFDLVIDIGERPDLITFNMLIDGYCLVSKMEEALRLLDSMVSAGIKPNVITYNTLINGYCRSGRLDDGVILFREMLHTRVKPNTVTYNIILDGLFRAGRTVAAKKMFHEMIETGTAVSISTYSIVLGGLCRNNCTDEAIAFFQKLVAMNVKFDIVILNTMIKAIYKVQRREEANDLFALLPACGLVPNASTYGVVIQNLLKEGSLEEADNMFSSMEKSGCAPSSRLVNDIIRKLLEKGEIVKAGNYMSKVDGKIISFEVSTTSLLLSLFSEKGKYREQLQLLPAKYQFFEGVI

SEQ ID NO: 503 - protein, 607 aa, Triticum aestivum; identical to SEQ ID NO: 501

SEQ ID NO: 504 - protein, 607 aa, Triticum aestivum
MMTKGGGCSPDVVTYNTVIHGFLQEGEVSKACDLYHEMVQQGVLHDVVTYNSILDALCKAGAMDKAELFLRQMVDDDIRPNEVTYNAMIHGYSTLGQWKKATQMFREMTSRGLAPNIVTWSSLMTSLCKHGRSKEAAEIFHSMAAKGHKPNIVTYRVLLHGYAAEGFFADMIDLFNSMANNGIVPDCHVFNILINAYAKCGMMDEAMSMLTEMRGQGVSPDVFTYATVIAALCRMGRLTDAMDNFNRMIGKGVQPSKVVYHSLIQGFCTHGNLVKVKELIFEMTDKGIPHPNIVFFSSIMHSLCNEGRVMDAHHIFDLVIDIGERPDLITFNTLIDGYCLVSKMEEALRLLDSMVSAGIKPNVITYNTLINGYCRSGRLDDGVILFREMLHTRVKPNTVTYNIILDGLFRAGRTVAAKKMFHEMIETGTAVSISTYSIVLGGLCRNNCTDEAITFFQKLVAMNVKSDIAILNTMIKAMYKVQRREEANDLFASLPAYGLVPNAATYGVMISNLLKEGSLEEADNMFSSMEKSGCAPSSRLVNDIIRKLLEKGEIVKAGNYMSKVDGKIISFEASTTSLLLSLFSEKGKYREQLQLLPAKYQFFEGVI

SEQ ID NO: 505 - protein, 696 aa, Triticum aestivum
MNCCCRVCRPDLGFALFGRLLRTGLKTDDIVTNTLLKCLCCAKRTDEAVSVLLHRMSKLGCVPDAISYNTVLKSLCDNSSSQRALDLLQMMTKGGGCSPDVVTYNTVIHGFLQEGEVSKACDRYHEMVQQGVLHDVVTYNSILDALCKAGAMDKAELFLRQMVDDDIRPNEVTYNAMIHGYSTLGQWKRATQMFREMTSRGLAPNIVTWSSLMTSLCKHGRSKEAAEIFHSMAAKGHKPNIVTYRVLLHGYAAEGFFADMIDLFNSIANNGIVPDCHVFNILINAYAKCGMMDEAMSMLTEMRGQGVSPDVFTYATVIAALCRMGRLTDVMDNFNRMIGKGVQPSKVVYHSLIQGFCTLGDLVKVKKLIFEITDKGIPHPNIVFFSSIMHSLCNEGRVMDAHHIFDLVIDIGERPDLITFNMLIDGYCLVSKMEEALRLLDSMVSAGIKPNVITYNTLINGYCRSGRLDDGVILFREMLHTRVKPNTVTYNIILDGLFRAGRTVAAKKMFHEMIETGTAVSISTYSIVLGGLCRNNCTDEAIAFFQKLVAMNVKFDIVILNTMIKAMYKVQRREEANDLFASLPACGLVPNASTYGVVIQNLLKEGSLEEADNMFSSMEKSGCAPSSRLVNDITRKLLEKGEIVKAGNYMSKVDGKIISFEASTTSLLLSLFSEKGKYREQLQLLPAKYQFFEGVI

SEQ ID NO: 506 - protein, 607 aa, Triticum aestivum; identical to SEQ ID NO: 504

SEQ ID NO: 507 - protein, 607 aa, Triticum aestivum; identical to SEQ ID NO: 501

SEQ ID NO: 508 - protein, 307 aa, Triticum aestivum
MSKLGCVPDAISYNTVLKSLCDNSSSQRALDLLQMMMKGGGCSPDVVTYNTVIHGFLQEGEVSKACDRYHEMVQQGVLHDVVTYNSILDALCKAGAMDKAELFLRQMVDDDIRPNEVTYNAMIHGYSTLGQWKKATQMFREMTSRGLAPNIVTWSSLMTSLCKHGRSKEAAEIFHSMAAKGHKPNIVTYRLLLHGYAAEGFFADMIDIFNSMANNGIVPDCHVFNILINAYAKCGMMDEAMSMLTEMRGQGVSPDVFTYATVIAALCRMGRLTDAMDNFNRMIGKGVQPSKVVYHSLIQGSVCMVIW

SEQ ID NO: 509 - protein, 696 aa, Triticum aestivum; identical to SEQ ID NO: 505

SEQ ID NO: 510 - protein, 465 aa, Triticum aestivum; identical to SEQ ID NO: 502

SEQ ID NO: 511 - protein, 259 aa, Triticum aestivum; identical to SEQ ID NO: 500

SEQ ID NO: 512 - protein, 696 aa, Triticum aestivum; identical to SEQ ID NO: 505

SEQ ID NO: 513 - protein, 607 aa, Triticum aestivum; identical to SEQ ID NO: 501

SEQ ID NO: 514 - protein, 696 aa, Triticum aestivum; identical to SEQ ID NO: 505

SEQ ID NO: 515 - protein, 569 aa, Triticum aestivum
MINLGVQPDAVTYSSFINALSKSGAMDKAEVVLRQMVDQGIVPNIITYTSLIHEYSTSGQWKAAVRIFKEMTSTGVRPNSVTLNSFIDSLCKHRKTKEARDIFDSMAANGHKPDIFSYSTLLNGYVKEGCFDDMTDLFNSMVRNGIVPNHHVFNILINAYAKRGLMDKAMHMFEVMRQQGVNPDVFSYQIVMDSLCKMGRMDAALDKFNQMVNQGVSPNKAVYQCLVLGSCSHGHFVKAKELISEAINRGLYSNSVFFYRVINDLCKEGKVNEAQDMFDFILGIGQRPDVIMYTSLMDGYCLVGEVEKALSVLDAMKSAGLQPDDVVYGTLLNGYCKIGRIADGLSLFREMSLSVVKPTTIIYNIILDGLFCSGRTVCAKENFDMMIESGIPVGVDTYNIVLHGLCRNNCTDEAIELFKKLCAMNVKINVITLNTMISALFKTRRIEEAKDLFATISAIGLVPSVVTYSVMMTNFIKEGLLADADDMFSAMEKAGCAPNSRLLNQVVRVFLKNGEVVKAVTYLAKLDAKQLSLEASTVSLIVSLFSRKGKLRKHVKLLPVKYQPPEMLD

SEQ ID NO: 516 - protein, 628 aa, Triticum aestivum
MDCCCRAHRLDLAFAFFGRLLRTGLKAGVIEVNTLLKGLCHTKRADEAMEVLLHRMPELGCTPDVVAYTTVIHGFFKEGQVGKACSLFHGMAQQGVAPDVMTYSSVIDALCKAKAMDKAEYFLRQMVDNGVVPDNVTYNSLIHGYSSSGHWKEAVRVLKEMTSQGIIPDIVSYRILLHGYATEGCLVDMINLFNSMARYCILPDCHIFNILINAYAKSGKLDKAMLIFREMQKQGVSPDAVTYSTVIHAFCKNGRLDDAVIKFNQMIDTGVQPNTSVYNALIQGFSTNGDLVKAKELVTEMMNKGMHPPDIKVFHSVMQNLCTEGRVTEARDILDLIVHIGMRPDVFTFTLLIGGYCLVGKMEDASKIFDDMMSYGLEPCNITYGILINGYCKNRRIDDGLILFKEMLHKGLKPTTFNYNVILDGLFLAGRTVAAKEKFDEMVESGVSVCIDTYSIVLGGLCRNNCSGEAITLFQKLSKMNVKFNIRIVNFMIDAFFRVQRKQEAEDLFAAISANGLVANVFTYSLMMTNLIKEGSAEKADTLFLSMEKSGCTANSWMLNLIIRRLLEKGEIVKAGNYMAKVDAKSYSLEAKTVSLLISLFSGKGKYREHIRLLPTKYQFREEAATVE

SEQ ID NO: 517 - protein, 668 aa, Triticum aestivum
MDCCCCRAHRLDLALAFFGHLLKTGLEADQVVFNTLLKGLCHAKRADEALDVLLHRMTELGCTPNVVAYNTIIHGFFKEGQVSKACNLFHEMAQQGVKPNVVTYNSVIDALCKARAMDKAEVVLRQMVDNGVVPDNVTYNSLIHGYSSSGHWKEAVRVFKEMTSRRVTADAHTYNMFMTFLCKHGRSKQAAGIFDSMAMKGLKPDNISYAILLHGYATEGCLVDVINLFNSIERDCILPDSRIFSILINAYAKSGKLDKAMLIFREMQKQGVSPDAFTYSTLIHAFCKKGRLDDAMIKFNQMVDTGVRQGTAVYGSLIQGFCTHGDLVKGKELVTEMMNKGIPPPDIMFFHSIMQNLCTERRVVEARDILGLIAHIGMRPNVCTFNILIGGYCLVRKMEDASKIFHDMMSYGLEPSNVTYGILINGYCKNRRIDDGLILFKEMLRKGLKPTTFNYNIILDGLFLAGRTVAAKEKFDEMVESGVSMCISTYSIVLRGLCRNNCSGEAITLFQKLSAMHVKFNIRIVNIMIDAFFRVQRKQEAKDLFAALTANGLVANVFTYSLMMTNLIKEGSVEEADTLFLSMEMSGCTSNSWMLNLIIRGLLEKGEIVKAGCYMSKVDAKSYSLEAKTVSLLIYLFSGKGKYREHIRLLPTKYQFLEEAATVEWFAI

SEQ ID NO: 518 - protein, 668 aa, Triticum aestivum; identical to SEQ ID NO: 517

SEQ ID NO: 519 - protein, 668 aa, Triticum aestivum; identical to SEQ ID NO: 517

SEQ ID NO: 520 - protein, 560 aa, Triticum aestivum
MDCCCRAHRVDLTLAFFGGLLRTGLEADQVIFSTLLKGLCHAKRTDEALNVLLHRMTELGCTPNVVAYSTVIHGFFKEGQVGKACSLFHEMAQQGVAPNLVTYTSVIDALCKAKAMDKAEYFLRQMVDNGVVPNNVTYNSLIHGYSSSSHWKEAVRVFKEMTSRRVTADVHTYNMFMTFLCKHGRSKEAAGFFDSMAMKGLKPDNVSYAILLHGYATEGCLVDMINLFNSMEKDSILPNCHIFSILINAYAKSGKLDKAMLIFSEMQKQGVSPDAVTYLPVIDAFCKKGRLDDAVIKFNQMIDMGVRPDTAVYTSLIQVFCTHGDLLKAKELVTEMMNKGIPPPDIKFFHSIMQNLCTEGRVIEARDILGLIAHIGMRPNVCTFNILIGGYCLVRKMEDASKIFDDMMSYGLEPSNITYGILINGYCKNLRIDDGLILFKEMLRKGVKPTTFNYNVILDGLFLAGRTVVAKEKFHEMVESGVSVCIGTYSIVLGGLCRNSCSSEAVTLFQKRKGAIAPGSLDSLLSGPYSLVKIRARLCIAAAHLQRQDLTATNNSARRL

SEQ ID NO: 521 - protein, 550 aa, Triticum aestivum
  misc_feature (530)..(532): Xaa can be any naturally occurring amino acid
  misc_feature (534)..(534): Xaa can be any naturally occurring amino acid
  misc_feature (537)..(537): Xaa can be any naturally occurring amino acid
  misc_feature (543)..(544): Xaa can be any naturally occurring amino acid
  misc_feature (550)..(550): Xaa can be any naturally occurring amino acid
MHSNEALDLLLHRMPELDCAPDVFSFNIVINGCFREGEVDKACNLFHEMPQLGVQPDVVTYNSIIIALSRAGAMGKAEVVLRQMVDKGIGPDVMTYNSLIHGYSTLGQWKAAVRVFKEMVSVGVLPNAVTLNSFMDSLCKHRRTKEARDIFDSMAAKGHKPNIASYSTMLNGYAKQGCFDDMTGLFNSMVQNDIVPNNHVFNILIRAYSTRGLMDEAMHMFEVMKQQGVNPDVVDYLVVIDSLCKMGRMDAAMDKFNQMVNQGVSPDIVVYQCLVLGSCSNGDFVKAKELISEAVNRGLCSNSVFFYPVINNLSKEGNVKDAQDMFDFIVGIGHQPDVIMYNSLMDGYCLVGKVEEAMTVLDAMKSAGLQPDAITYAILLNGYCKIGRIDDGLSLFREISLSRVKPTTIMYNIILDGLFCCGRTVFAKEEFDTMIESGIPVGIDTCTIVLSGLCKNNCTDEAIELFKKLCAMNVKFDVIILTTMISAMFKTRRIEEAKDLFATISTIGLVPSVVTYSVMMTNFIKEGSLXXXDXMFXAMEKAXXLEDLTX

SEQ ID NO: 522 - protein, 619 aa, Triticum aestivum
MHSNEALDMLLHRMPELDCAPDVFSFNIVINGCFREGEVDKACNLFHEMPQLGVQPDVVTYNSIIIALSRAGAMGKAEVVLRQMVDKGIGPDVMTYNSLIHGYSTLGQWKAAVRVFKEMVSVGVLPNAVTLNSFMDSLCKHRRTKEARDIFDSMAAKGHKPNIASYSTMLNGYAKQGCFDDMTGLFNSMVQNGIVPNNHVFNILIRAYSTRGLMDEAMHMFEVMKQQGVNPDVVDYLVVIDSLCKMGRMDAAMDKFNQMVNQGVSPDIVVYQCLVLGSCSNGDFVKANELISEAVNRGLCSNSVFFYPVINNLSKEGNVKDAQDMFDFIVGIGHQPDVIMYNSLMDGYCLVGKVEEAMTVLDAMKSAGLQPDAITYAILLNGYCKIGRIDDGLSLFREISLSRVKPTTIMYNIILDGLFCCGRTVFAKEEFDTMIESGIPVGIDTCTIVLSGLCKNNCTDEAIELFKKLCAMNVKFDVIILTTMISAMFKTRRIEEAKDLFATISTIGLVPSVVTYSVMMTNFIKEGSLAEADDMFLAMEKAGCAPDSRLLNHVVRVLLEKGAVVKAATYLAKLDGKQLSLEASTVSLIVSLFSRKGKLREHVKLLPVKYQPPESSTDN

SEQ ID NO: 523 - protein, 522 aa, Triticum aestivum
MHSNEALDLLLHRMPELDCAPDVFSFNIVINGCFREGEVDKACNLFHEMPQLGVQPDVVTYNSIIIALSRAGAMGKAEVVLRQMVDKGIGPDVMTYNSLIHGYSTLGQWKAAVRVFKEMVSVGVLPNAVTLNSFMDSLCKHRRTKEARDIFDSMAAKGHKPNIASYSTMLNGYAKQGCFDDMTGLFNSMVQNDIVPNNHVFNILIRAYSTRGLMDEAMHMFEVMKQQGVNPDVVDYLVVIDSLCKMGRMDAAMDKFNQMVNQGVSPDIVVYQCLVLGSCSNGDFVKAKELISEAVNRGLCSNSVFFYPVINNLSKEGNVKDAQDMFDFIVGIGHQPDVIMYNSLMDGYCLVGKVEEAMTVLDAMKSAGLQPDAITYAILLNGYCKIGRIDDGLSLFREISLSRVKPTTIMYNIILDGLFCCGRTVFAKEEFDTMIESGIPVGIDTCTIVLSGLCKNNCTDEAIELFKKLCAMNVKFDVIILTTMISAMFKTRRIEEAKDLFATISTIGLVPSVVTYSVIFFF

SEQ ID NO: 524 - protein, 632 aa, Triticum aestivum
MAFQSTAAAVLAAWTLDTAAMGHVIKLGFAEESIVNFSHLLKAICAEKKTSCAMDIVLRVMPELNCTPNIFSYSILFKGLCNEKRSQEALDLIHIMVEHGGSCQPNVVSYSTVIDGLLKEGEVNKAYSLFCEMLQRRISPDVVTCSSIISGMCKLHAMDKAEDVLQQMLDRGILPDVATYTSLMHGYYSLGQCEEVDRIFKEMSRNGVQPDIVTSNIQMDYLCKNGRCAEARKIFDSMVSLGQKPTVTTYSILLHGYAMERSFHDMNCLIDLMVGNGIAPNHFIYNILISAYAKEEMVDDVLHIFTKMRQQGLNPNVVNYGAVINLLSSFGRMDDAMSQFNQMIAEGLAPDIIVFNPLIRGFCSCGKWKKVHELFSEMLDRGIYPNTVFFNTIMDRLCKYGRVMEAQDLFDLMVHMGVKPDVCTYNTLIGGYLFVGKMDEVSKLLDNMVSIGMEPDVITYNILIDGYSKNGRIDDALVVSREMLAGKVKPCVITFNIMIGALLKCGRKEEAKDLFDGIWAKGLVPTVVTYSLMIQKLIEEGSLQESDDLFVSMEKNGCAADSHMLNAIVRSLFRKGEVPRAGTYLSKIDERSFTLEASTASLLTALASGGKGQEYKELLPEKYHSFLEQGTD

SEQ ID NO: 525 - protein, 632 aa, Triticum aestivum; identical to SEQ ID NO: 524

SEQ ID NO: 526 - protein, 632 aa, Triticum aestivum; identical to SEQ ID NO: 524

SEQ ID NO: 527 - protein, 646 aa, Triticum aestivum
MSELGCVHNAFSYSIVLKSLCDNSMSQRGLDMLQMMAKEGGVCFPNVVAYSTVIHGFFKEGETGKACNLFHEMMQQGLVPDVVTYNSIIDALCKARAMDKAELVLRQMVANGAQPDTVTYNCMINGYATSGRLKESAKMFREMKSRGLMPDIVTCNSFLSSLCKHGRSKEAAEFFDSMTAKGHKPDIVSCRILLHGYATEGCFADMIDLFNSVGSNGIAADCRVFKILINRYAKRGMTDEAMLIFTEMRGQGVSPNVVTYSIVIAALSRKLSRMGRLTDAMDKFDQMVALGVQPDRSIYQSLIQGFFMHGGLVKAKELVSQMINKGIPRPDIVFFNSVINSMCKEGRVMDAHDIFDLVIDIGERPDDISFNSLIDGYCLVGNMDKAFKILDAMEVGVEPDVITYNTLVNGYCRNGRIDDGLALFREMPHKRIKPDTVTYDIILNGLFHSGSTVAARKMFHEMIESGITVSIPTYGIIIAGFCRNNCAEEAIDLFHKLSAMNVKFDIAIHNTMINAIFKVGRREEAKDLFAAISPSGLVPTESTYAVMITNLLEDGVVEEADNMFSSMEKSGIIPSSRLLNCIIRMLLEKGEIAKAGNYLSKVDGKSILLEASTTLLMLSLFSKKGKYREDMKLLPAKYQFFMDLVD

SEQ ID NO: 528 - protein, 646 aa, Triticum aestivum
MSELGCVHNAFSYSIVLKSLCDNSMSQRGLDMLQMMAKEGGVCFPNVVAYSTVIHGFFKEGETGKACNLFHEMMQQGLVPDVVTYNSIIDALCKARAMDKAELVLRQMVANGAQSDTVTYNCMINGYATSGRLKESAKMFREMKSRGLMPDIVTCNSFLSSLCKHGRSKEAAEFFDSMTAKGHKPDIVSCRILLHGYATEGCFADMIDLFNSVGSNGIAADCRVFKILINRYAKRGMTDEAMLIFTEMRGQGVSPNVVTYSIVIAALSRKLSRMGRLTDAMDKFDQMVALGVQPDRSIYQSLIQGFFMHGGLVKAKELVSQMINKGIPRPDIVFFNSVINSMCKEGRVMDAHDIFDLVIDIGERPDDISFNSLIDGYCLVGNMDKAFKILDAMEVGVEPDVITYNTLVNGYCRNGRIDDGLALFREMPHKRIKPDTVTYDIILNGLFHSGSTVAARKMFHEMIESGITVSIPTYGIIIAGFCRNNCAEEAIDLFHKLSAMNVKFDIAIHNTMINAIFKVGRREEAKDLFAAISPSGLVPTESTYAVMITNLLEDGVVEEADNMFSSMEKSGIIPSSRLLNCIIRMLLEKGEIAKAGNYLSKVDGKSILLEASTTLLMLSLFSKKGKYREDMKLLPAKYQFFMDLVD

SEQ ID NO: 529 - protein, 646 aa, Triticum aestivum; identical to SEQ ID NO: 527

SEQ ID NO: 530 - protein, 638 aa, Triticum aestivum
MSRRFVPLDRRILERNIKARYHAGDIGTQDALHLFDELLHVAGPSSVRAINCLLTVVGRDCPALGVSLFNRVARAKVPPHNVTYGILVDCCCRAGRLDLGHAAMGRVIKLGFTAEAIVNFSHLLKAICAEKKTSYAMDIVLRIMPEFNCIPNIFSYNILFKGLCNEKRSQEALDLIQVMVEDGGCCQPDVVTYNTVIDGLLKEGEVGKAYSLFSEMLRQGVSPNVVTCNSIISGMCKLHAMDKAEEVLQQMLDRGILPDVATYNSLIHGYYSLGQCEEVDRIFKEMTTNGVQPDIVTYNIQMDYLCKNGRCAEARKIFDSMISLGQKPTVTTYNILLHGYAMERSFHDMNCLIELMDDNGISPDHYGYNILISAYAKEKMVDDVLHIFTKMRQQGLNPDVANYGAVINLLSSIGRMDDAMSQYNQMINEGLAPDIIVFNSLISGFCSCGKWEKVHELFSEMLDRGICPNTVFFTTIMDRLCKNGRVMEAQDLFDLMVHMGVKPDVWTYNTLIGGYLFIGKMDEVSKLLDNMCSIGLKPNVFTYGILIDGYSKNGSIDDALVVIREMLDGVKPSIITFNIMIGVLLKGSRMEEAKDLFDGIWAKGLVPDVVTYSLMIQKLIEEGSLTVVNFFHQASKLL

SEQ ID NO: 531 - protein, 638 aa, Triticum aestivum; identical to SEQ ID NO: 530

SEQ ID NO: 532 - protein, 638 aa, Triticum aestivum; identical to SEQ ID NO: 530

SEQ ID NO: 533 - protein, 615 aa, Triticum aestivum
MRILKYETVITSTKYLNTKQIQNIQQNCMMHACTNTTQSHALRVKCMVRSGPANRIPVAPSPHLRPPSSRRWTRPVGRRRRALGLTVAAGRSERHHRTRPSSFHQSKVLVVASRIHRCRNWTATMSRLQVRSFSSPVSSRANDLLSELQGHLGFRTLRPELAHQLFDQMMRQPVPVSARALNGLFAALARAPPSAACTDGPALAIDLFNRMARAGRRRVIALTSHTYSILIECCCRVRRPDLGPSFFAHLLKTGVTANIVIYSGLIKCLCDLKCTEEALDVLLHRMPNNISDAISYSVILKSFCDSGRSQLALDLLHMMAKKGADHSPDVLAYNMVIDGFFKEGEVSKTFDLFHEMIQQGPVPDVVTYSFFINALCKARAMDKAEVVLRSMIHNGVQPDAVTYNSLIQGFLTSGQLKEAFRLLKLMTRQGVIPDVVTCNSVMDYLCKHGRVKEAAEIFYSTAVKGRKPDIVSYSIMLHGYAIEGSLVKMIDLCEMMARDGVVPDLSCFNILIKAYAKYGRMDVAMLFFEDMLKQGVKPNELTYLTVISAFCKMGRMDDAMEKFSEMINMGVPLDTEVYMCMVEGYLNLGDSMKAKEFITKMKNRDIHHKPWKGNR

SEQ ID NO: 534 - protein, 602 aa, Triticum aestivum
MPRFSSTTSMSSLRLRLRLHARHSSSASQPSRSQGWDPHAAFAAATERARSGNLTPEDAHNLFDELLRQGNPVLERPLNNLLAALARAPASSACGDGPALAVALFSRISQGARLRVAHPTACTYSILMDCCYRARCPDLSLAFFGRLLRTGLKADQFVFSTLLKGLCHAKRSDEALDVLLHRMPELGCTPYVVAYNTVIHGFFREGQVGKACNLFHEMRQQGVTPDVVTYNSVIDALCKAKAMDKAEYFLGQMVDDGVVPDNVTYNSLIHGYSSSGHWKEAVRVFKEMTSRRVTADVHTYNMFMTFLCKHGRSKEAAGIFDTMAMKGLKPNIVSYSTLLHGYATEGCLIDMINLFNSMERDCILPNCHIFSILINAYAKSGKLDKAMLIFNEMQKQGLSPDAFTYLPVIDAFCKKGRLDDAMIKFNQMIDTGVRPDTAVYTSLIQGFCTHGDLVKAKELVTEMMNKGIPPPDIKFFHSIMQNLCTEGRVTKAWDILGLIAHIGMRPNVVTFSVLVGGYCLVRKMADASKVFDDMVSYGLEPCNIMYGILINGYCKNRRIDDGLILFKEMLHKGLKPTTFNYNVILNGLFLAGQTVAAKEKFD

SEQ ID NO: 535 - protein, 602 aa, Triticum aestivum; identical to SEQ ID NO: 534

SEQ ID NO: 536 - protein, 602 aa, Triticum aestivum; identical to SEQ ID NO: 534

SEQ ID NO: 537 - protein, 602 aa, Triticum aestivum; identical to SEQ ID NO: 534

SEQ ID NO: 538 - protein, 602 aa, Triticum aestivum; identical to SEQ ID NO: 534

SEQ ID NO: 539 - protein, 602 aa, Triticum aestivum; identical to SEQ ID NO: 534

SEQ ID NO: 540 - protein, 618 aa, Triticum aestivum
MSQRALDLLQMMAKEGGGCSPNVVAYSTVIRGFFKEGETGKACNLFHEMMQQGVEPSVWTYSSIIDALCKARAMDKAELVLQQMVNKGVQPNNVTYNCMIHGYSTSGQSKEAAKLLREMKSRDLIPDIVTRNSFLASLCKHGRSKEAAEFLDSMTAKGHKPDIVSYRILLHGYASEGCFADMIDLFNSMESNGIAADCHVFNILINGYAKRGMTEEAMLIFTEMRGQGVSPDVVTYSIVIAALSRMGRLTDAIEKFNEMTALEVQPDTTVYHSLIQGCCIDGDLVKAKELMFEMMNGGIPRPNIVFFNSVINSLCKEGRVMDAHDVLDLVIGIGERPDVITFNSLIDGYCLVGKTDKAFKILDVMKSVGVESDVVTYSALLDGYFKNRRIDDALTLFREMPRKRIKPGTVTYGIMLDGLFRAGRTVAAKKMFHEMNESGTTVDISTYNIILGGLCRNKCADEAITLFQKLRAMNVKLNIKILNTMINAMYTVQRKEEAKDLFSAMSANGLVPNESTYAVMIRNLLKDGAVEDADNMFSSMDNSGIIPSSCLINDIIRMLLEKGEIAKAGNYLSKVDGKRISLEASTTSLMLSLFSRKGKHQEDIKLLPAKYQFFDGFG

SEQ ID NO: 541 - protein, 618 aa, Triticum aestivum; identical to SEQ ID NO: 540

SEQ ID NO: 542 - protein, 618 aa, Triticum aestivum; identical to SEQ ID NO: 540

SEQ ID NO: 543 - protein, 618 aa, Triticum aestivum; identical to SEQ ID NO: 540

SEQ ID NO: 544 - protein, 618 aa, Triticum aestivum; identical to SEQ ID NO: 540

SEQ ID NO: 545 - protein, 618 aa, Triticum aestivum; identical to SEQ ID NO: 540

SEQ ID NO: 546 - protein, 320 aa, Triticum aestivum
MDYLCKNGRCAEARKIFDSMVSLGQKPTVTTYSILLHGYAMERSFHDMNCLIDLMVGNGIAPNHFIYNILISAYAKEEMVGEVMHIFTKMRQQGLNPDVANYEAVINLLSSIGRMDDAMSQYNQMITEGLLPGIILFSQLISGFRTCGKWEKVHELFSEMLDRGIYPNTVFLNTIMDHLCKNGRVMEAQDLFDLMVHMGVKPDVCTYSTLIGGYLFVGQMDEVSKLLDNMVSIGLKPNVITYTILIDGYCKNGRIDDALVVFREMLAGKVKPCIITFNIMIGALLKGGRKEEAKDLFDGIWAKGLVPTVVTYSLMIQKLI

SEQ ID NO: 547 - protein, 621 aa, Triticum aestivum
MSRRVVPVGRRILEQNIKARYHARDIGTEDALHLFDELLQDAQPSSIHAINCLLTIIRRDCPALGVSLFNRIARAKVAPDIITYGILVQCCCRAGRLDLGHAAMGHIIKLGFAAESIVNFNHLLKAICAEKKTSYAMDIVLRLMPEFNCIPNIFSYNILFKGLCNEKRSQEALELIQIMVEDGGCCRPDVVTYNTVVDGLLKEGEVGKAYSLFSEMLHRGISPNAVTYSSIICGMCRLHLMDKAEEVLQQMFDREILPDVATYTSLIHGYYSLGQCEEVDRIFKEMSRNGVQPDIVTYNIQMDYLCKNGRCAEARKIFDSMVSLGQKPTVTTYSILLHGYAMERSFHDMNCLIDLMVGNGIAPNHFIYNILISAYAKEEMVGEVMHIFTKMRQQGLNPDVANYEAVINLLSSIGRMDDAMSQYNQMITEGLLPGIILFSQLISGFRTCGKWEKVHELFSEMLDRGIYPNTVFFNTIMDHLCKNGRVMEAQDLFDLMVHMGVKPDVCTYSTLIGGYLFVGQMDEVSKLLDNMVSIGLKPNVITYTILIDGYCKNGRIDDALVVFREMLAGKVKPCIITFNIMIGALLKGGRKEEAKDLFDGIWAKGLVPTVVTYSLMIQKLI

SEQ ID NO: 548 - protein, 621 aa, Triticum aestivum; identical to SEQ ID NO: 547

SEQ ID NO: 549 - protein, 622 aa, Triticum aestivum
MRLWTFCFTGCLSLAAPLTWWRDVVAYNTVIHGFFKEGQVGKACNLFHGMAQQGVAPNLVTYNSVIDALCKAKAMDKAEYFLGQMVDDGVVPDNVTYNSLIHGYSSSGHWKEAVRVFKEMTSRRVKPNVHTHNMFMTFLCKHGRSKEAAGIFDTMAMKGLKHNNVSYAILLHGYATEGCLVDMINLFNSMERDCILPDCRIFSILINAYAKSGKLDKAMLIFNKMQKQGVSPNAVTYSTVIDAFCKKGQLDDAMIKFNQMIDTGVRQGTAVYGSLIQGFCTHCDLVKAKELLTEMMNKGMLPPDIAFFNSIMQNLCTEGRVIEARDVLGLIAHIGVRPDVCTFNILIGGYCLVGKMEHASKIFDDMMSYGLEPSNITYGILINGYCKNRRIDDGLILFKEMLHKGLKPTTFNYNVILDGLFLAGRTVAAKEKFDEMVESGVSVCIGTYSIVLGGLCRNNCFSEAIMLFQKLRAMNMKFNIRIVNIMIDAFFRVQRKQEAKDLFAAIPANGLVANVVTYSITMTNLIKEGSVEEANTLFLSMEKSGCTANAWMLNHTIRRLLERGEIVKAGNYMSKVDAKSYSLEAKTVSLLISLFSGKGKYREHIGLLPTKYQFREEAATVE

SEQ ID NO: 550 - protein, 622 aa, Triticum aestivum; identical to SEQ ID NO: 549

SEQ ID NO: 551 - protein, 622 aa, Triticum aestivum
MRLWTFCFTGCLSLAAPLTWWRDVVAYNTVIHGFFKEGQVGKACNLFHGMAQQGVAPNLVTYNSVIDALCKAKAMDKAEYFLGQMVDDGVVPDNVTYNSLIHGYSSSGHWKEAVRVFKEMTSRRVKPNVHTHNMFMTFLCKHGRSKEAAGIFDTMAMKGLKHNNVSYAILLHGYATEGCLVDMINLFNSMERDCILPDCRIFSILINAYAKSGKLDKAMLIFNKMQKQGVSPNAVTYSTVIDAFCKKGQLDDAMIKFNQMIDTGVRQGTAVYGSLIQGFCTHCDLVKAKELLTEMMNKGMLPPDIAFFNSIMQNLCTEGRVIEARDVLGLIAHIGVRPDVCTFNILIGGYCLVGKMEHASKIFDDMMSYGLEPSNITYGILINGYCKNRRIDDGLILFKEMLHKGLKPTTFNYNVILDGLFLAGRTVAAKEKFDEMVESGVSVCIGTYSIVLGGLCRNNCFSEAIMLFQKLRAMNMKFNIRIVNIMIDAFFRVQRKQEAKDLFAAIPANGLVANVVTYSITMTNLIKEGSVEEADTLFLSMEKSGCTANAWMLNHTIRRLLERGEIVKAGNYMSKVDAKSYSLEAKTVSLLISLFSGKGKYREHIGLLPTKYQFREEAATVE

SEQ ID NO: 552 - protein, 622 aa, Triticum aestivum; identical to SEQ ID NO: 551

SEQ ID NO: 553 - protein, 622 aa, Triticum aestivum
MRLWTFCFTGCLSLAAPLTWWRDVVAYNTVIHGFFKEGQVGKVCNLFHGMAQQGVAPNLVTYNSVIDALCKAKAMDKAEYFLGQMVDDGVVPDNVTYNSLIHGYSSSGHWKEAVRVFKEMTSRRVTADVHTHNMFMAFLCKHGRSKEAAGIFDTMAIKGLKPDNVSYAILLHGCATEGCLVDMINLFNSMATDCILPNCHIFNILINAYAKSGKLDKAMLIFNVMQKQGVSPDGVTYSTVIHAFCKMGSLDIAMDKFNQMVDMGVRPNAIVYHSLIQGFCTHGDLVKAKELVAEMRNKAMRPPDIKFFHSIMQNLCTEGRVIEARDILDLIVRIGMRPDVPIFNLLIGGYCLVRKMADASKIFDDMVSYGLEPSNITYGILINGYCKNRRIDDGLILFKEMLPKGLKPTTFNYNVILDGLFLAGRTVAAKEKFDEMVESGVSVCIGTYSIVLGGLCRNNCSGEAITLFQKLSTMDVKFNIIIVNIMIDAFYKVQRNQEAKDLFAAVSANGLVANVFTYTIMMKNLIKEGSVEEADDLFLSMEKSGCTADSYMLNLIVRMLLGKGEIVKAGNYISKIDAKSYSLEAKTVSLLISLFSGKGKYREHIGLLPAKYRFREEAATVV

SEQ ID NO: 554 - protein, 622 aa, Triticum aestivum; identical to SEQ ID NO: 553

SEQ ID NO: 555 - protein, 625 aa, Triticum aestivum
MICLHKRSKAIQSSPVQYAHSARPASPRRCPSLHLLRRRSSSFTPTSPPSRSWSPHAAFAAATESVRAGTLSPQDAHQLFDQLLRQSTPVPGQALNGFLAGLARARDTDACRDGPSLALTLFNRVYGEEAGPRVAPPTVHTYNILMNCCCRVGRSDLGLAYFSRLLRTGLKANEVTASTVLKCLCCAKPADEAVNVLLHRMSVLGCVPNSFSYNIVLKSLCDDSRSEQALDLLQVMAKGDDCPPPNVLSYSTLIHGFFKEGEVGKACNLFHEMMRQGVVPDVVTYSSIIDALCKAGAMDKAELFLRQMVDSGVPPNKVTYTSMIHGYSTLDWWKEATKMFREMTSRGLIPDIVSWNSFMDSLCKHGRSKEAAEIFDSMAAKGHRPNIVSYTILLHGYANEGSFADMMSLFNSMEGDGIVANCYVFNILINAYAKRRMMDEAVLILTEMRGQGLSPDVFTYSTLISALCKMGRLADAMDKFSQMIGTGVQPDTVVYQSLIQGFCTHGELVYEMMNKGIPCPNIAFFSSIVDSLCKEGRVMDAHHIFDLVKDIGERPDIIMFNTLIDGYCLVGEMGKAFMVLDVMTSAGIEPDAITYSTLVSGYCKSGRIDGGLILFREMLHKKCYI

SEQ ID NO: 556 - protein, 625 aa, Triticum aestivum; identical to SEQ ID NO: 555

SEQ ID NO: 557 - protein, 571 aa, Triticum aestivum
MPQLGVQPDVVTYTSIMDALSKSGAMDKAEVLLRQMVDQGIEPNIRTYSCLIHGYSTFGQWKEALRVFKEMASLGVVPDVVTLSSLIDSLCRHRRTKQAREIFDSMAAKGLKPNIVSYSTMLNGYVKEGSFEDMTDLFNSMVRNGIVPNHHIFNILINAYAKRGLMDEAMHMFEVMRQQGVNPDVFGYQIIMDSLCKMGKMDAALDKFNQMVNQGVSPNKAVYQCLVLGSCSHGDFVKAKELISEAVNRGLCSNSVFFYPVINDLCKEGKVKEAHDMFDFILGIGQRPDVIMYTSLMDGYCLVGKVEEALRVLDAMKSAGLQPDVFTYGTLLNGYCKIGRIADGLSLFREMSLSGVKPTTIMYNIILDGLFRSGRTDSAKEEFDTMIESGIPVGIDTCTIVLSGLCKNNCTDEAIELFKKLCAMNVKFDVIILNTMISSMFKTRRIEEAKDLFATISTIGLVPSVVTYSVMMTNFIKEGSLAEADDMFLAMEKASCAPNSILLNQVVRALLKKGAVVKAATYLAKLDAKQLSVEASTISLIVFLFSGEGKLREHVELLPVKYQPPESSADS

SEQ ID NO: 558 - protein, 571 aa, Triticum aestivum; identical to SEQ ID NO: 557

SEQ ID NO: 559 - protein, 607 aa, Triticum aestivum
MAKDRGGCFPDVVAYNTVIHGFFKEGETGKACNLFHEMIHQGVEPDVVTYNSVVDALCKARAMDKAELVLRQMVADGAQPNAVTYNCMINGYATSGRLKEAAKMFREMKSRGLIPDIFTCNSLMTYLCKHGRSKEAAEFFYSMTAKGHKPDIVSYCILLHGYATEGCFPDMIDVFNSMENNGIAADFHVFNILIDAYAKRGMMDEAMLISSKMQERRVNPDIVTYSSIIAGLSRLGRLTEAMEKFNQMIALGVQPNKVVYHALIQGFCIDGDLAKAKQLVSEMMNRGIPRPNISFFSSLIKSLCQEGRVMDAHDIFDLVIDMGERPDDILFNSLIDGYCLVRKMDKALKVLDVMESVGVEPDVITYNTLVNGYCRNGRIGDGLTLFREMPRKRIKPDTNSYCVIMDGLFRSGRTVSGREMFHEMIESGTTVSISTYNVILGGLCGNNCADEAIALFQKLGSMNVKFSIAIVNTMIDAMYRVGRREEAKELFAGISASGLVPNESTYGVMIMNLLKDGAVEDANNVFSSMDKSGIVPSSRLLNDIIRMLLEKDEIAKAGNYLSKVDGKSISLEASTTSLMLSLFSREGKYREDMKLLPAKYQFFDGFC

SEQ ID NO: 560 - protein, 607 aa, Triticum aestivum
MAKDRGGCFPDVVAYNTVIHGFFKEGETGKACNLFHEMIHQGVEPDVVTYNSVVDALCKARAMDKAELVLRQMVADGAQPNAVTYNCMINGYATSGRLKEAAKMFREMKSRGLIPDIFTCNSLMTYLCKHGRSKEAAEFFYSMTAKGHKPDIVSYCILLHGYATEGCFPDMIDVFNSMENNGIAADFHVFNILIDAYAKRGMMDEAMLISSKMQERRVNPDIVTYSSIIAGLSRLGRLTEAMEKFNQMIALGVQPNKVVYHALIQGFCIDGDLAKAKQLVSEMMNRGIPRPNISFFSSLIKSLCQEGRVMDAHDIFDLVIDMGERPDDILFNSLIDGYCLVRKMDKALKVLDVMESVGVEPDVITYNTLVNGYCRNGRIGDGLTLFREMPRKRIKPDTNSYCVIMDGLFRSGRTVSGREMFHEMIESGTTVSISTYNVILGGLCGNNCADEAIALFQKLGSMNVKFSIAIVNTMIDAMYRVGRREEAKELFAGISASGLVPNESTYGVMIMNLLKDGAVEDANNVFSSMDKSGIVPSSRLLNDIIRMLLEKGEIAKAGNYLSKVDGKSISLEASTTSLMLSLFSREGKYREDMKLLPAKYQFFDGFC

SEQ ID NO: 561 - protein, 607 aa, Triticum aestivum; identical to SEQ ID NO: 560

SEQ ID NO: 562 - protein, 607 aa, Triticum aestivum
MAKDRGGCFPDVVAYNTVIHGFFKEGETGKACNLFHEMIHQGVEPDVVTYNSVFDALCKARAMDKAELVLRQMVADGAQPNAVTYNCMINGYATSGRLKEAAKMFREMKSRGLIPDIFTCNSLMTYLCKHGRSKEAAEFFYSMTAKGHKPDIVSYCILLHGYATEGCFPDMIDVFNSMENNGIAADFHVFNILIDAYAKRGMMDEAMLISSKMQERRVNPDIVTYSSIIAGLSRLGRLTEAMEKFNQMIALGVQPNKVVYHALIQGFCIDGDLAKAKQLVSEMMNRGIPRPNISFFSSLIKSLCQEGRVMDAHDIFDLVIDMGERPDDILFNSLIDGYCLVRKMDKALKVLDVMESVGVEPDVITYNTLVNGYCRNGRIGDGLTLFREMPRKRIKPDTNSYCVIMDGLFRSGRTVSGREMFHEMIESGTTVSISTYNVILGGLCGNNCADEAIALFQKLGSMNVKFSIAIVNTMIDAMYRVGRREEAKELFAGISASGLVPNESTYGVMIMNLLKDGAVEDANNVFSSMDKSGIVPSSRLLNDIIRMLLEKDEIAKAGNYLSKVDGKSISLEASTTSLMLSLFSREGKYREDMKLLPAKYQFFDGFC

SEQ ID NO: 563 - protein, 607 aa, Triticum aestivum; identical to SEQ ID NO: 562

SEQ ID NO: 564 - protein, 607 aa, Triticum aestivum; identical to SEQ ID NO: 562

SEQ ID NO: 565 - protein, 567 aa, Triticum aestivum
MIHQGVEPDVVTYNSVVDALCKARAMDKAEVVLQQMVDKGVQPNIVTYTCMINGYSTTGRLKEAAKMFREMKSRGLIPDIVTCNSLMTSLCKHGRSKEAAEVFYSMTAKGHKPDIVSYRILLHGYATEGCFPDMIDVFNSMENNGIAADCHVFNILIDAYTKRGMIDEAMLISSKMQERRVNPDIVTYSSIIAGLSRLGRLTEAMEKFNQMIALGVQPNKVVYHALIQGFCIDGDLAKAKQLVSEMMNKGIPRPNISFFSSVIKSLCQEGRVMDAHDIFDLVIDMGERPDAILFNSLIDGYCLVRKMDKALKVLDVMESVGVEPDVITYNTLVNGYCRNGRIDDGLTLFREMPRKRIKPDTISYCVIMDGLFRSGRTVSAREMFHEMIENGTTVSISTYNVILGGLCRNNCADEAIALFQKLGSMNVKFSIAIVNTMIDAMYRVGRREEAKELFAGISARGLVPNVSTYGVLIMNLLKDGAVEDANNVFSSMDKSGIVPSSRLMNDIIRLLLEKGEIAKAGYYLSKVDGKSISLEASTTSLMFSLFSRKGKYMKDMNLLPAKYQFFD

SEQ ID NO: 566 - protein, 445 aa, Triticum aestivum
MIHQGVEPDVVTYNSVVDALCKARAMDKAEVVLQQMVDKGVQPNIVTYTCMINGYSTSGRLKEAAKMFREMKSRGLIPDIVTCNSLMTSLCKHGRSKEAAEVFYSMTAKGHKPDIVSYRILLHGYATEGCFPDMIDVFNSMENNGIAADCHVFNILIDAYTKRGMIDEAMLISSKMQERRVNPDIVTYSSIIAGLSRLGRLTEAMEKFNQMIALGVQPNKVVYHALIQGFCIDGDLAKAKQLVSEMMNKGIPRPNISFFSSVIKSLCQEGRVMDAHDIFDLVIDMGERPDAILFNSLIDGYCLVRKMDKALKVLDVMESVGVEPDVITYNTLVNGYCRNGRIDDGLTLFREMPRKRIKPDTISYCVIMDGLFRSGRTVSAREMFHEMIENGTTVSISTYNVILGGLCRNNCADEAIALFQKLGSMNVKFSIAIVNTMIDAMYRVG

SEQ ID NO: 567 - protein, 567 aa, Triticum aestivum
MIHQGVEPDVVTYNSVVDALCKARAMDKAEVVLQQMVDKGVQPNIVTYTCMINGYSTSGRLKEAAKMFREMKSRGLIPDIVTCNSLMTSLCKHGRSKEAAEVFYSMTAKGHKPDIVSYRILLHGYATEGCFPDMIDVFNSMENNGIAADCHVFNILIDAYTKRGMIDEAMLISSKMQERRVNPDIVTYSSIIAGLSRLGRLTEAMEKFNQMIALGVQPNKVVYHALIQGFCIDGDLAKAKQLVSEMMNKGIPRPNISFFSSVIKSLCQEGRVMDAHDIFDLVIDMGERPDAILFNSLIDGYCLVRKMDKALKVLDVMESVGVEPDVITYNTLVNGYCRNGRIDDGLTLFREMPRKRIKPDTISYCVIMDGLFRSGRTVSAREMFHEMIENGTTVSISTYNVILGGLCRNNCADEAIALFQKLGSMNVKFSIAIVNTMIDAMYRVGRREEAKELFAGISARGLVPNVSTYGVMIMNLLKDGAVEDANNVFSSMDKSGIVPSSRLMNDIIRLLLEKGEIAKAGYYLSKVDGKSISLEASTTSSMFSLFSRKGKYMKDMNLLPAKYQFFD

SEQ ID NO: 568 - protein, 567 aa, Triticum aestivum; identical to SEQ ID NO: 567

SEQ ID NO: 569 - protein, 567 aa, Triticum aestivum
MIHQGVEPDVVTYNSVVDALCKARAMDKAEVVLQQMVNKGVQPNIVTYTCMINGYSTSGRLKEAAKMFREMKSRGLIPDIVTCNSLMTSLCKHGRSKEAAEVFYSMTAKGHKPDIVSYRILLHGYATEGCFPDMIDVFNSMENNGIAADCHVFNILIDAYTKRGMIDEAMLISSKMQERRVNPDIVTYSSIIAGLSRLGRLTEAMEKFNQMIALGVQPNKVVYHALIQGFCIDGDLAKAKQLVSEMMNKGIPRPNISFFSSVIKSLCQEGRVMDAHDIFDLVIDMGERPDAILFNSLIDGYCLVRKMDKALKVLDVMESVGVEPDVITYNTLVNGYCRNGRIDDGLTLFREMPRKRIKPDTISYCVIMDGLFRSGRTVSAREMFHEMIENGTTVSISTYNVILGGLCRNNCADKAIALFQKLGSMNVKFSIAIVNTMIDAMYRVGRREEAKELFAGISARGLVPNVSTYGVMIMNLLKDGAVEDANNVFSSMDKSGIVPSSRLMNDIIRLLLEKGEIAKAGYYLSKVDGKSISLEASTTSSMFSLFSRKGKYMKDMNLLPAKYQFFD

SEQ ID NO: 570 - protein, 567 aa, Triticum aestivum; identical to SEQ ID NO: 567

SEQ ID NO: 571 - protein, 385 aa, Triticum aestivum
MMQQGVVPDVVTYNSIIDALCKARAMGKAELFLGQMVDNSVRPDNVTYTAVIHGYSTLGQWKKATKMFREMTRRGLEPNTVTWNSFMASLCKHGRSKEAAEIFHSMAAKGHKPDVVSYCVLLQGYATEGCFADMVDLYNSMARNGIVPNRQVFNILIDAYAKRGMTDEATLIFTEMRGQGLSPDVCTYSTLISALSRTGRLADAMDRFSQMISIGIQPDAVVYQALIQGYCTVGDLVKAKGLVSEMMNRGIPPTDIVFFNSIMSSLCKEGRVTNAHSILDFVIHFGERPSIITFNLLIDGYCLVGKMKKAFRVLDTMASVGIGPDDISYSAIINGCFKNGRIDDGLTIFREMLKKVTPTTVTYNIILGGLFCAGQTVAAQKMFMR

SEQ ID NO: 572 - protein, 385 aa, Triticum aestivum; identical to SEQ ID NO: 571

SEQ ID NO: 573 - protein, 569 aa, Triticum aestivum
MMQQGVVPDVVTYNSIIDALCKARAMGKAELFLGQMVDNSVRPDNVTYTAVIHGYSTLGQWKKATKMFREMTSRGLEPNTVTWNSFMDSLCKHGRSKEAAEIFHSMAAKGHKPDVVSYRVLLQGYATEGCFADMVDLYNSMARNGIVPNRQVFNILIDAYAKRGMTDEATLIFTEMRGQGLSPDVCTYSTLISALSRTGRLADAMDRFSQMISIGIQPDAVVYQALIQGYCTVGDLVKAKGLVSEMMNRGIPPTDIVFFNSIMSSLCKEGRVTNAHSILDFVIHFGERPSIITFNFLIDGYCLVGKMKKAFGVLDTMASVGIGLDDISYSAIINGCFKNGRIDDGLTIFREMLKKVTPTTVTYNIILGGLFCAGQTVAAQKMFHEMIESGITVSSSTYRTILGGLCRNSCEDEAITLFQKLGAMNVKLDIAILNTMINAMFKVQRREEAIDLFAAVSSSGLVPNASTYGVMIKNLLREGSVEKAENMFSLMEKSGCAPDSRLINDIIRILLQKGEIVKAGNYMSKVDGRRISLEARTTSLLIRLFSSEGKYRGQINLLPVKYQNFDGFS

SEQ ID NO: 574 - protein, 569 aa, Triticum aestivum; identical to SEQ ID NO: 573

SEQ ID NO: 575 - protein, 569 aa, Triticum aestivum; identical to SEQ ID NO: 573

SEQ ID NO: 576 - protein, 569 aa, Triticum aestivum
MMQQGVVPDVVTYNSIIDALCKVRAMGKAELFLGQMVDNSVRPDNVTYTAVIHGYSTLGQWKKATKMFREMTSRGLEPNTVTWNSFMDSLCKHGRSKEAAEIFHSMAAKGHKPDVVSYRVLLQGYATEGCFADMVDLYNSMARNGIVPNRQVFNILIDAYAKRGMTDEATLIFTEMRGQGLSPDVCTYSTLISALSRTGRLADAMDRFSQMISIGIQPDAVVYQALIQGYCTVGDLVKAKGLVSEMMNRGIPPTDIVFFNSIMSSLCKEGRVTNAHSILDFVIHFGERPSIITFNFLIDGYCLVGKMKKAFGVLDTMASVGIGLDDISYSAIINGCFKNGRIDDGLTIFREMLKKVTPTTVTYNIILGGLFCAGQTVAAQKMFHEMIESGITVSSSTYRTILGGLCRNSCEDEAITLFQKLGAMNVKLDIAILNTMINAMFKVQRREEAIDLFAAVSSSGLVPNASTYGVMIKNLLREGSVEKAENMFSLMEKSGCAPDSRLINDIIRILLQKGEIVKAGNYMSKVDGRRISLEARTTSLLIRLFSSEGKYRGQINLLPVKYQNFDGFS

SEQ ID NO: 577 - protein, 608 aa, Triticum aestivum
MMAKEGGGCFPNVVAYNTVIHGFLKEGKTGKACNLFHEMMQLGLVPDVVTYNSIVDALCKARAMDKAEVVLHQMIGKGAQPDTVTYNCMIHGYSTSGRLKEAVKMFREMKSRGLAPNIVTCGSLMTSLCKHGRSKEAREIFDSMTAKGHRANVVSYSILLHGYANEGCFADMIDLFNSMKSNGIAADCRVFTILIDAYAKRGMMDDAMHIFTEMWEKGVSPDVVTYSTVIAALSRMGRLTDAMDKFNQMISMGVQPNTVVYHTLIQGSCMHGDLIKAKELVSEMMNKGIPRPSIAFFGSIINRLCKDGRVMDAHDIFDLVIDIGERPSVITFNSLVDGYCLVGKMDKAFGMLNAMESVGVEPDIVTYSTLLDGYFKNGRINDGLTLFREMPLKRIKPDTVTYGIMLDGCFRAGRTVAARTMFHEMIESGITVDIPTYNIVLRGLCRNNCTDEAIALFQKLGAMSMKFNIAILNTMINAIYKVRRREEANNLFAAISASGLVPNQSTYAVMIINLLKDGAVEHASNMFSSMEKSGIVPSSRLINGIIRLLLENGEIAKAGIYLSKVDGNSISLEASTTSLMLSLFSRKGKYQEDMKLLPAKYQFFGEFG

SEQ ID NO: 578 - protein, 348 aa, Triticum aestivum
MMAKEGGGCFPNVVAYNTVIHGFLKEGKTGKACNLFHEMMQLGLVPDVVTYNSIVDALCKARAMDKAEVVLHQMIGKGAQPDTVTYNCMIHGYSTSGRLKEAVKMFREMKSRGLAPNIVTCGSLMTSLCKHGRSKEAREIFDSMTAKGHRANVVSYSILLHGYANEGCFADMIDLFNSMKSNGIAADCRVFTILIDAYAKRGMMDDAMHIFTEMWEKGVSPDVVTYSTVIAALSRMGRLTDAMDKFNQMISMGVQPNTVVYHTLIQGSCMHGDLIKAKELVSEMMNKGIPRPSIAFFGSIINRLCKDGRVMDAHDIFDLVIDIGERPSVITFKCNDTRPLCTYCLLLN

SEQ ID NO: 579 - protein, 608 aa, Triticum aestivum; identical to SEQ ID NO: 577

SEQ ID NO: 580 - protein, 608 aa, Triticum aestivum; identical to SEQ ID NO: 577

SEQ ID NO: 581 - protein, 265 aa, Triticum aestivum
MSWNQLVLSLMLLHIIHLLMAIVKVEGSMMVSFYSEKCRVRELNLTVTYGIILAGLFRAWRTIAARTMFHEMIESGITVDIVTYNIILTGLCRNNCIDEAIALFQKLGVMSVKFNIAIINTMIDAMYKVRRREEASDLFAAISASGLVPNESTYAVMIINLLKDGAVEEADNMFSSMEKSGIVPSSRLLNRIIRMLLEKGETAKAGNYLSKVDGKGISLEASTTSLMLSLFSREGKYREDVKLLPAKYQFFDGFVDFAQDSAQEA

SEQ ID NO: 582 - protein, 606 aa, Triticum aestivum
MWAYNTVIHGFFKEGETGKACNLFHEMVRQGIVPDVVTYNSIIDALCKARAMDKAELVLQQMVADGAQPNEVTYNSMINGYASSGRLKGTTKMFREMKRRGLIPDNFTCNSFLASLCKHGRSKEAAEFFDSMTAKGHKPDIVSYCTLLHGYASEGCFADMIDLFNSMESNVIAADCRVFTILIVAYAKRGMMDEAMLVSSKMQERGVNPNIFTYSSIIAGLSRMGRLTEAMEKFNQMIALGVQPDKVVYLSLIQGFCLDGDLAKVKQLVSEMMNRGIPHSGIPFFGSVIKNLCQEGRVMDAHEIFDLVIDMGERPDDILFNSLIDGYCLVGKMDKALKVLDVMESVGVEPDVITYNTLVNGYCKSGRIDDGLVLFREMPSKRVKPDTVTYGIILAGLFRAWRTIAARTMFHEMIESGITVDIVTYNIILTGLCRNNCIDEAIALFQKLGVMSVKFNIAIINTMIDAMYKVRRREEAGDLFAAISASGLVPNESTYAVMIINLLKDGAVEEADNMFSSMEKSGIVPSSRLLNRIIRMLLEKGETAKAGNYLSKVDGKGISLEASTTSLMLSLFSREGKYREDVKLLPAKYQFFYGFVDFAQDSAQEA

SEQ ID NO: 583 - protein, 410 aa, Triticum aestivum
MWAYNTVIHGFFKEGETGKACNLFHEMVRQGIVPDVVTYNSIIDALCKARAMDKAELVLQQMVADGAQPNEVTYNSMINGYASSGRLKGTTKMFREMKRRGLIPDNFTCNSFLASLCKHGRSKEAAEFFDSMTAKGHKPDIVSYCTLLHGYASEGCFADMIDLFNSMESNGIAADCRVFTILIVAYAKRGMMDEAMLVSSKMQERGVNPNIFTYSSIIAGLSRMGRLTEAMEKFNQMIALGVQPDKVVYLSLIQGFCLDGDLAKVKQLVSEMMNRGIPHSDIPFFGSVIKNLCQEGRVMDAHEIFDLVIDMGERPDDILFNSLIDGYCLVGKMDKALKVLDVMESVGVEPDVITYNTLVNGYCKSGRIDDGLVLFREMPSKRVKPDCYIWHHTGRVVSCLENYCCKDNVP

SEQ ID NO: 584 - protein, 606 aa, Triticum aestivum
MWAYNTVIHGFFKEGETGKACNLFHEMVRQGIVPDVVTYNSIIDALCKARAMDKAELVLQQMVADGAQPNEVTYNSMINGYASSGRLKGTTKMFREMKRRGLIPDNFTCNSFLASLCKHGRSKEAAEFFDSMTAKGHKPDIVSYCTLLHGYASEGCFADMIDLFNSMESNGIAADCRVFTILIVAYAKRGMMDEAMLVSSKMQERGVNPNIFTYSSIIAGLSRMGRLTEAMEKFNQMIALGVQPDKVVYLSLIQGFCLDGDLAKVKQLVSEMMNRGIPHSDIPFFGSVIKNLCQEGRVMDAHEIFDLVIDMGERPDDILFNSLIDGYCLVGKMDKALKVLDVMESVGVEPDVITYNTLVNGYCKSGRIDDGLVLFREMPSKRVKPDTVTYGIILAGLFRAWRTIAARTMFHEMIESGITVDIVTYNIILTGLCRNNCIDEAIALFQKLGVMSGKFNIAIINTMIDAMYKVRRREEASDLFAAISASGLVPNESTYAVMIINLLKDGAVEEADNMFSSMEKSGIVPSSRLLNRIIRMLLEKGETAKAGNYLSKVDGKGISLEASTTSLMLSLFSREGKYREDVKLLPAKYQFFDGFVDFAQDSAQEA

SEQ ID NO: 585 - protein, 606 aa, Triticum aestivum; identical to SEQ ID NO: 582

SEQ ID NO: 586 - protein, 606 aa, Triticum aestivum; identical to SEQ ID NO: 582

SEQ ID NO: 587 - protein, 606 aa, Triticum aestivum
MWAYNTVIHGFFKEGETGKACNLFHEMVRQGIVPDVVTYNSIIDALCKARAMDKAELVLQQMVADGAQPNEVTYNSMINGYASSGRLKGTTKMFREMKRRGLIPDNFTCNSFLASLCKHGRSKEAAEFFDSMTAKGHKPDIVSYCTLLHGYASEGCFADMIDLFNSMESNGIAADCRVFTILIVAYAKRGMMDEAMLVSSKMQERGVNPNIFTYSSIIAGLSRMGRLTEAMEKFNQMIALGVQPDKVVYLSLVQGFCLDGDLAKVKQLVSEMMNRGIPHSDIPFFGSVIKNLCQEGRVMDAHEIFDLVIDMGERPDDILFNSLIDGYCLVGKMDKALKVLDVMESVGVEPDVITYNTLVNGYCKSGRIDDGLVLFREMPSKRVKPDTVTYGIILAGLFRAWRTIAARTMFHEMIESGITVDIVTYNIILTGLCRNNCIDEAIALFQKLGVMSGKFNIAIINTMIDAMYKVRRREEASDLFAAISASGLVPNESTYAVMIINLLKDGAVEEADNMFSSMEKSGIVPRSRLLNRIIRMLLEKGETAKAGNYLSKVDGKGISLEASTTSLMLSLFSREGKYREDVKLLPAKYQFFDGFVDFAQDSAQEA

SEQ ID NO: 588 - protein, 535 aa, Triticum aestivum
MPRLRLRRFSTAPMFHLLRRSSSSTTTSPPSRSWSPHAAFAAATERIRAGTLSREDAHHLFDELLRQATPVPSRSLNGLLAALARVPAPAACIRDGPALALGLFNRVCRDEAGARVAPPTVFTYGILMHCCCCAHRPDLGLALFGRFLRTGLKTNEIIATTFLKCLCYAKRTDEALNVLLHRMSELGCVPDAISYNIVLKSLCEDSMSQRALDLLQMMAKEGGGCSPNVVAYSTVIHGFFKEGETGKACNLFHEMMQQDVEPNVWTYSSIIDALCNARAMDKAELVLQQMVNKGVQPNNVTYNCMIHGYSTSGRWKEAAKLFREMKSRGLIPDTSTCNALMTYHCKHGRSKEAAEFFDAMTAKGHRDVISYCILLHGYANEGCFADMIDLFNSMESNGFVADCHVFTILIDAYAKRGMMDEAMLIFTEMREKGVSPNVVTYSTVIAALCRLGRLSDAMDRFNEMTDMGVQPNTAVYHSLIQGFCMHGDLVKVKEFVSEMMNKGIPRPDIAFFTSVINSLCKEGRVMNAQVSLTWL

SEQ ID NO: 589 - protein, 535 aa, Triticum aestivum; identical to SEQ ID NO: 588

SEQ ID NO: 590 - protein, 535 aa, Triticum aestivum; identical to SEQ ID NO: 588

SEQ ID NO: 591 - protein, 519 aa, Triticum aestivum
MATASFEERTTSPPSRSWSPHAAIAAATERIRAGTLSREDAHHLFDELLRQATPVPSRSLNGLLAALARVPAPAACIRDGPALALGLFNRVCRDEAGARVAPPTVFTYGILMHCCCCAHRPDLGLALFGRFLRTGLKTNEIIATTFLKCLCYAKRTDEALNVLLHRMSELGCVPDAISYNIVLKSLCEDSMSQRALDLLQMMAKEGGGCSPNVVAYSTVIHGFFKEGETGKACNLFHEMMQQDVEPNVWTYSSIIDALCNARAMDKAELVLQQMVNKGVQPNNVTYNCMIHGYSTSGRWKEAAKLFREMKSRGLIPDTSTCNALMTYHCKHGRSKEAAEFFDAMTAKGHRDVISYCILLHGYANEGCFADMIDLFNSMESNGFVADCHVFTILIDAYAKRGMMDEAMLIFTEMREKGVSPNVVTYSTVIAALCRLGRLSDAMDRFNEMTDMGVQPNTAVYHSLIQGFCMHGDLVKVKEFVSEMMNKGIPRPDIAFFTSVINSLCKEGRVMNAQVSLTWL

SEQ ID NO: 592 - protein, 596 aa, Triticum aestivum
MWWHIAVIHGFFKEGETSKACNLFHEMMQQGVEPSVWTYSSIIDALCKARAMDKAELVLQQMVNKGVQPNNVTYNCMIHGYSTSGRWKEAAKLFREMKSQGLIPDTFTCNALMTYLCKHGRSKEGAEISDAMTAKGHKPDIVSYSILLHGYANEGCFADMIDLFNSMERNGIAADCHVFSILINGYAKCGMTDEAMLIFTEMWEKGVSPDVVTYSTVIAALSRMGRLTDAMEKFNQMIAMGIQPNTAIYHSLIQGFCIDGDLVKAKQLVSEMMNRGIPRPNIVFFNLVINSLCKEGRVMDAHDVLDLVIGIGERPNVITFNSLIDGYCLVGKMDKAFKILDVMKSVGVESDVVTYSALLDGYSKNRRIDDALTLFREMPHKRIKSDTVTYGIVLDGLFHAGRTVAAMKMFHEMIKSGTTVSIYTYSIILGGLCRNNCVDDAIALFQKLRSMNVKFNIEILNTMINAMYKVQRKEEAKDLFTTISANGLVPSESTYAVMIRNLLKDGAVEDADNMFSSMDNSGIVPSSHLINDIIRMLLEKGEIAKAGNYLSKVDGKSISLEASTTSLMLSLFSRKGKHQEDIKLLPAKYQIFDGFS

SEQ ID NO: 593 - protein, 586 aa, Triticum aestivum
MSNLRLLRRSSSSMSTTTSPPSRSWSPHSAFAAATERVRARTLSQDDAHHLFDELLRQATPVHERSLNGFLAALARATSSAACIRDGPALAIALFNRVCREQAGPRVAPLTVHTYGILMECCCRAGHPELGLAIFSRLLRTGLKTNEIVGSTFLKCLSYAKRTDEALNVLLHRMPELGCVPNAFSYSIVLKSLCNNSMSQRALDLLQRMAKEGGGCFLNVVTHSTVIHGFFKEGEIGKACTLFHEMMQQGVVPNVWTYNSIIDALCKARAMDKAELVLRQMVAKGAQPDTVTYNCLINGYATSGRLKEAAKMFREMKSRGLTPNIVTCGSLTTSLCKHGRSKEAREIFDSMTSKGHRANVVSYSILLHGYANEGCFADMIYLFNSMKSNGIAADCRVFNILINGYAKRGMMDEAVLIFTEMREKGVSPDVVTYTTVIAALSRMGRLTDAVDEFDEMIAMGVQPSIPVYQSLIQGFCIDGDLVKAKELVSEMMNKGIPCPNIVFFNSVINSLCKEERVMDAHDIFDLVIDIGERPDTITFSSLIDGYCLVGKMDKAFGMLNAMELVGVEPDCNAFDAAISPTCRSTT

SEQ ID NO: 594 - protein, 584 aa, Triticum aestivum
MSRRFVPVGRHILEQNIKARYHAGDIGTEDALHLFDELLQVAGRSSIHAINCLLTVVGRDCPALGVSLFNRVARSKVAPCSITYAILVDCCCRAGRQDLGHTAMGHVIKMGFLADAIITFSHLLKAICAENKTSYAMDIVLQEMDISSIFDRIFQEMSRNGVQPDIVTYTIQMDYLCKSGRCTEARKIFDSMISLGQKPTVTTYSILLHGYAMEKSFHDMLCLIDLMVGNGIVPDHYVYNILISAYAKEEMVGEVMHIFTKMRQQGLNPDAVSYGTVIDLLSRIGRMDDAMSLFNQMITEGLAPGIIVFNHLISGFCTCGKWEKVHELFSEMLDCGICPDTVFFNTVMDRLCKNGRVTEAQDLFDLMVHMGVKPDVCTYNTLMGGYLFVGKMDEVSKLLDNMVSIGMEPDVITYNILIDGYSKNGRIDDALVVFREMLDTKGKPSVISFNIMIGALLKCGRKAEAKDLFDGIWANGLVPDIVTYSLMIQKLIEEGSLQESDDLFVSMEKNGCAANSRMLNAIVRSLLQKGEVPRAGTYLSKIDERSFILEASTASLLTALASRGKGQEYKELLPEKYSELLIEA

SEQ ID NO: 595 - protein, 584 aa, Triticum aestivum; identical to SEQ ID NO: 594

SEQ ID NO: 596 - protein, 584 aa, Triticum aestivum; identical to SEQ ID NO: 594

SEQ ID NO: 597 - protein, 545 aa, Triticum aestivum
  misc_feature (479)..(479): Xaa can be any naturally occurring amino acid
MSRRFPPVGRRILERRIEERYSARDIGTDDTLNLFDELIQVAGPSSVRAINCLLTVVGRDCPALGVSLFNRVARAKVPPHNITYGILVDCCCRAGRLDLGHAAMGHVIKLGFTAEAIVNFSHLLKAICAVKKTSYAMDIVLRVMPEFNCTPNIFSYSILFKGLCNERRSQEALELINIMVEDGGSCQPDVVTYNTVIDGLLKEGEVDQAYSLFSEMLRQGVSPNVVTCNSIISGMCKLHAMDKAEEVLQQMLDRRILPDVATYNSLIHGYYSLGQCEEVDRIFKEMTTNGVQPDVVTYNIQMDYLCKNGRCAEARKIFDSMISLGQKPTVTTYNILLHGYAMERSFHDMNCLIELMDDNGISPDHYGYNILISAYAKEKMVDDVLHIFTKMRQQGLNPDVANYGAVINLLSSIGRMDDAMSQYNQMINEGLAPDIIVFNSLISGFCSCGKWEKVHELFSEMLDRGICPNTVFFTTIMDXLCKNGRVIEAQDVFDLMVHMGVKPDVRSHVTLMHGYFADGKMDEMRKLLENMCSIGLKLMLSPIAY

SEQ ID NO: 598 - protein, 511 aa, Triticum aestivum
MSRRFPPVGRRILERRIEERYSARDIGTDDTLNLFDELIQVAGPSSVRAINCLLTVVGRDCPALGVSLFNRVARAKVPPHNITYGILVDCCCRAGRLDLGHAAMGHVIKLGFTAEAIVNFSHLLKAICAVKKTSYAMDIVLRVMPEFNCTPNIFSYSILFKGLCNERRSQEALELINIMVEDGGSCQPDVVTYNTVIDGLLKEGEVDQAYSLFSEMLRQGVSPNVVTCNSIISGMCKLHAMDKAEEVLQQMLDRRILPDVATYNSLIHGYYSLGQCEEVDRIFKEMTTNGVQPDVVTYNIQMDYLCKNGRCAEARKIFDSMISLGQKPTVTTYNILLHGYAMERSFHDMNCLIELMDDNGISPDHYGYNILISAYAKEKMVDDVLHIFTKMRQQGLNPDVANYGAVINLLSSIGRMDDAMSQYNQMINEGLAPDIIVFNSLISGFCSCGKWEKVHELFSEMLDRGICPNTVFFTTIMDRLCKNGRVMEAQDLFQADRRRRPGNVSQVEGDP

SEQ ID NO: 599 - protein, 593 aa, Triticum aestivum
  misc_feature (508)..(508): Xaa can be any naturally occurring amino acid
MVSIGEHARPPNSAFLLPNPSSCPGCAGAVGGERRRRPLGPLPLPDSSRSISGAMSRRAVPAGRRILEQNIKARYRAGAIGTDDALHLFDELLQVAWPSSIAAINCLLIVVGRDCPVLAVSLFNHIARAKVAPHNITYGILVDCCSRAGRLDLGFAAMGHIVKMGFVARSVVSFSHLLRAVCAKKKTSYRMDIMLQIMPELNCIPDVYSYSILFKGLCNEKRSQEALELIHVMVEHGGSCQPNLVSYNTVIDGLLKEGEVGKAYSLFCEMVQSGILANIVTYNSIISGMCKVHAMDKAEKVLQQMFDREILPDTATYTTLIRGYYSSGQCKEVERVFEHMSINGVQPNMITCNIQMDYLCKSGRCAEARKIFDSMVSLGQKPSVTTYSILLHGYVMEKSFHDMHCLLDLMVENGISPDHHVYNILISAYAKEEMASEVMHIFTKMRQQGLNPSVADYGAVINLLSSIGRMDDAMSQFNQMIAEGLAPDIIVFNPLISGFCTCGKWEKXHELFSEMLNRGTYHDTVFFTTIMDRLCKNGRVMEAQDMFDLMVHVGVKPNVHTYATLMHGYFFVRKMDEVRKLLGNILSIGSKPD

SEQ ID NO: 600 - protein, 593 aa, Triticum aestivum
MVSIGEHARPPNSAFLLPNPSSCPGCAGAVGGERRRRPLGPLPLPDSSRSISGAMSRRAVPAGRRILEQNIKARYRAGAIGTDDALHLFDELLQVAWPSSIAAINCLLIVVGRDCPVLAVSLFNHIARAKVAPHNITYGILVDCCSRAGRLDLGFAAMGHIVKMGFVARSVVSFSHLLRAVCAKKKTSYRMDIMLQIMPELNCIPDVYSYSILFKGLCNEKRSQEALELIHVMVEHGGSCQPNLVSYNTVIDGLLKEGEVGKAYSLFCEMVQSGILANIVTYNSIISGMCKVHAMDKAEKVLQQMFDREILPDTATYTTLIRGYYSSGQCKEVERVFEHMSINGVQPNMITCNIQMDYLCKSGRCAEARKIFDSMVSLGQKPSVTTYSILLHGYVMEKSFHDMHCLLDLMVENGISPDHHVYNILISAYAKEEMASEVMHIFTKMRQQGLNPSVADYGAVINLLSSIGRMDDAMSQFNQMIAEGLAPDIIVFNPLISGFCTCGKWEKFHELFSEMLNRGTYHDTVFFTTIMDRLCKNGRVMEAQDMFDLMVHVGVKPNVHTYATLMHGYFFVRKMDEVRKLLGNILSIGSKPD

SEQ ID NO: 601 - protein, 593 aa, Triticum aestivum; identical to SEQ ID NO: 600

SEQ ID NO: 602 - protein, 254 aa, Triticum aestivum
  misc_feature (44)..(44): Xaa can be any naturally occurring amino acid
MSINGVQPNMITYNIQMDYLCKSGRCAEARKIFDSMVSLGQKPXVTTYSILLHGYVMEKSFHDMHCLLDLMVENGISPDHHVYNILISAYAKEEMASEVMHIFTKMRQQGLNPSVADYGAVINLLSSIGRMDDAMSQFNQMIAEGLAPDIIVFNPLISGFCTCGKWEKVHELFSEMLNRGTYPDTVFFTTIMDRLCKNGRVMEAQDMFDLMVHVGVKPNVHTYATLMHGYFFVRKMDEVRKLLGNMLSIGSKPD

SEQ ID NO: 603 - protein, 593 aa, Triticum aestivum; identical to SEQ ID NO: 600

SEQ ID NO: 604 - protein, 593 aa, Triticum aestivum
MVSIGEHARPPNSAFLLPNPSSCLGCVGAVGGERHRRPLGPLRLPDSSRSIGGAMSRRTVPAGRRILEQNIKARYRAGAIGTDDALHLFDELLQVAWPSSIAAINCLLIVVGRDCPALAVSLFNHIARAKVAPHNITYGILVDCCSHAGRLDLGFAAMGHIVKTVFAAGSIVSFSHLLRAVCAEKKTSYGMDIVLRIMPELNCIPDVYSYSMLFKGLCNEKRSQEALEMIHVMVEHGGSCQPNLVSYNAVIDGLLKEGEVGKAYILFCEMVQSGILANIVTYNSIISGMCKVHAMDKAEKVLQQMFDREILPDTATYTSLIHGCYSSGQCKEVERVFEHMSINGVQPNMITYNIQMDYLCKSGRCAEARKIFDSMVSLGQKPSVTTYSILLHGYVMEKSFHDMHCLLDLMVENGISPDHHVYNILISAYAKEEMASEVMHIFTKMRQQGLNPSVADYGAVINLHSSIGRMDDAMPQFNQMIAEGLAPDIIVFNPLISGFCTCGKWEKVHELFSEMLNRGTYHDTVFFTTIMDRLCKNGRVMEAQDMFDLMVHVGVKPNVHTYATLMHGYFFVRKMDEVRKLLGNMLSIGSKPD

SEQ ID NO: 605 - protein, 593 aa, Triticum aestivum
MVSIGEHARPPNSAFLLPNPSSCPGCVGAVGGERHRRPLGPLPLPDSSRSIGGAMSRRAVPAGRRILEQNIKARYRAGAIGTDDALHLFDELLQVAWPSSIAAINCLLIVVGRDCPALAVSLFNHIARAKVAPHNITYGILVDCCSRAGRLDLGFAAMGHIVKTGFAAGSVVSFSHLLRAVCAEKKTSYGMDIVLRIMPELNCIPDVYSYSILFKGLCNEKRSQEALELIHVMVEHGGSCQPNLVSYNTVIDGLLKEGEVGKAYSLFCEMVQSGILANIVTYNSIISGMCKVHAMDKAEKVLQQMFDREILPDTATYTSLIHGYYSSGQCKEVERVFEHMSINGVQPNMITYNIQMDYLCKSGRCAEARKIFDSMVSLGQKPSVTTYSILLHGYVMEKSFHDMHCLLDFMVENGISPDHHVYNILISAYAKEEMASEVMHIFTKMRQQGLNPSVADYGAVINLLSSIGRMDDAMSQFNQMIAEGLAPDIIVFNPLISGFCTCGKWEKVHELFSEMLNRGTYHDTVFFTTIMDRLCKNGRVMESQDMFDLMVHVGVKPNVHTYATLMHGYFFVRKMDEVRKLVGNMLSIGSKPD

SEQ ID NO: 606 - protein, 593 aa, Triticum aestivum
MVSIGEHARPPNSAFLLPNPSSCLGCVGAVGGERHRRPLGPLRLPDSSRSIGGAMSRRAVPAGRRILEQNIKARYRAGAIGTDDALHLFDELLQVAWPSSIAAINCLLIVVGRDCPALAVSLFNHIARAKVAPHNITYGILVDCCSHAGRLDLGFAAMGHIVKTVFAAGSIVSFSHLLRAVCAEKKTSYGMDIVLRIMPELNCIPDVYSYSMLFKGLCNEKRSQEALEMIHVMVEHGGSCQPNLVSYNAVIDGLLKEGEVGKAYILFCEMVQSGILANIVTYNSIISGMCKVHAMDKAEKVLQQMFDREILPDTATYTSLIHGCYSSGQCKEVERVFEHMSINGVQPNMITYNIQMDYLCKSGRCAEARKIFDSMVSLGQKPSVTTYSILLHGYVMEKSFHDMHCLLDLMVENGISPDHHVYNILISAYAKEEMASEVMHIFTKMRQQGLNPSVADYGAVINLHSSIGRMDDAMPQFNQMIAEGLAPDIIVFNPLISGFCTCGKWEKVHELFSEMLNRGTYPDTVFFTTIMDRLCKNGRVMEAQDMFDLMVHVGVKPNVHTYATLMHGYFFVRKMDEVRKLLGNMLSIGSKPD

SEQ ID NO: 607 - protein, 593 aa, Triticum aestivum
MVSIGEHARPPNSAFLLPNPSSCPGCVGAVGGERHRRPLGPLPLPDSSRSIGGAMSRRAVPAGRRILEQNIKARYRAGAIGTDDALHLFDELLQVAWPSSIAAINCLLIVVGRDCPALAVSLFNHIARAKVAPHNITYGILVDCCSHAGRLDLGFAAMGHIVKTVFATGSIVSFSHLLRAVCAEKKTSYGMDIVLRIMPELNCIPDVYSYSMLFKGLCNEKRSQEALEMIHVMVEHGGSCQPNLVSYNAIIDGLLKEGEVGKAYSLFCEMVQSGILANIVTYNSIISGMCKVHAMDKAEKVLQQMFDREILPDTATYTSLIHGCYSSGQCKEVERVFEHMSINGVQPNMITYNIQMDYLCKSGRCTEARKIFDSMVSLGQKPSVTTYSILLHGYVMEKSFHDMHCLLDLMVENGISPDHHVYNILISAYAKEEMASEVMHIFTKMRRQGLNPSVADYGAVINLLSSIGRMDDAMPQFNQMIAEVLAPDIIVFNPLISGFCTCGKWEKVHELFSEMLNRGTYPDTVFFTTIMDRLCKNGRVMEAQDMFDLMVHVGVKPNVHTYATLMHGYFFVRKMDEVRKLLGNMLSIGSKPD

SEQ ID NO: 608 - protein, 593 aa, Triticum aestivum
MVSIGEHARPPNSTFLLPNPSSCPGCAGAVGGERHRRPLGPLPLPDSSRSIGGAMSRRAVPAGRRILEQNIKARYRAGAIGTDDALHLFDELLQVAWPSSIAAINCLLIVVGRDCPTLAVSLFNHIARAKVAPHNITYGILVDCCSRAGRLDLGFAAMGHIVKTGFAAGSVVSFSHLLRAVCAEKKTSYGMDIVLRIMPELNCIPDVYSYSILFKGLCNEKRSQEALELIHVMVEHGGSCQPNLVSYNTVIDGLLKEGEVGKAYSLFCEMVQSGILANIVTYNSIISGMCKVHAMDKAEKVLQQMFDREILPDTATYTSLIHGYYSSGQCKEVERVFEHMSINGVQPNMITYNIQMDYLCKSGRCAEARKIFDSMVSLGQKPFVTTYSILLHGYVMEKSFHDMHCLLDLMVENGISPDHHVYNILISAYAKEEMASEVMHIFTKMRQQGLNPSVADYGAVINLLSSIGRMDDAMSQFNQMIAEGLAPDIIVFNPLISGFCTCGKWEKVHELFSEMLNRGTYPDTVFFTTIMDRLCKNGRVMEAQDMFDLMVHVGVKPNVHTYATLMHGYFFVRKMDEVRKLLGNMLSIGSKPD

SEQ ID NO: 609 - protein, 593 aa, Triticum aestivum
  misc_feature (423)..(423): Xaa can be any naturally occurring amino acid
MVSIGEHARPPNSAFLLPNPSSCPGCAGAVGGERRRRPLGPLPLPDSSRSIGGAMSRRAVPAGRRILEQNIKARYRAGAIGTDDALHLFDELLQVAWPSSIAAINCLLIGVGRDCPALAVSLFNHIARAKVAPHNITYGILVDCCSRAGRLDLGFAAMGHIVKTGFAAGSVVSFSHLLRAVCAKKKTSYGMDIVLRIMPELNCIPDVYSYGILFKGLCNEKRSQEALELIHVMVEHGGSCQPNLVSYNTVIDGLLKEGEVGKAYILFCEMVQSGILANLVTYNSIISGMCKVHAMDKAEKVLQQMFDREILPDTATYTSLIHGYYSSGQCKEVERVFEHMSINGVQPNMITYNIQMDYLCKSGRCAEARKIFDSMVSLGQKPSVTTYSILLHGYVMEKSFHDMHCLLDLMVENGISPDHHVYXILISAYAKEEMASEVMHIFTKMRQQGLNPSVADYGAVINLLSSIGRMDDAMSQFNQMIAEGLAPDIIVFNPLISGFCTCGKWEKVHELFSEMLNRGTYPDTVFFTTIMDRLCKNGRVMEAQDKFDLMVHMGVKPNVHTYATLMHRYFFVMKMDEVRKLLGNMLSIGSKPD

SEQ ID NO: 610 - protein, 593 aa, Triticum aestivum
MVSIGEHARPPNSAFLLPNPSSCPGCVGAVGGERHRRPLGPLPLPDSSRSIGGAMSRRAVPAGRRILEQNIKARYRAGAIGTDDALHLFDELLQVAWPSSIATINCLLIVVGRDCPALAVSLFNHIARANVAPHNITYGILVDCCSRAGRLDLGFAAMGHIVKTGFAAGSVISFSHLLRAVCAEKKTSYGMDIVLRIMPELNCIPDVYSYSILFKGLCNEKRSQEALELIHVMVEHGGSCQPNLVSYNTVIDGLLKEGEVGKAYSLFCEMVQSGILANIVTYNSIISGMCKVHAMDKAEKVLQQMFDREILPDTATYTSLIHGYYSSGQCKEVERVFEHMSINGVQPNMITYNIQMDYLCKSGRCAEARKIFDSMVSLGQKPSVTTYSILLHGYVMEKSFHDMHCLLDFMVENGISPDHHVYNILISAYAKEEMASEVMHIFTKMRQQGLNPSVADYGAVINLLSSIGRMDDAMSQFNQMIAEGLAPDIIVFNPLISGFCTCGKWEKVHELFSEMLNRGTYHDTVFFTTIMDRLCKNGRVMESQDMFDLMVHVGVKPNVHTYATLMHGYFFVRKMDEVRKLVGNMLSIGSKPD

SEQ ID NO: 611 - protein, 593 aa, Triticum aestivum
MVSIGEHARPPNSAFLLPNPSSCPGCAGAVGGERRRRPLGPLPLPDSSRSIGGAMSRRAVPAGRCILEQNIKARYRAGAIGTDDALHLFDELLQVAWPSSIAAINCPLIVVGRDCPALAVSLFNHIARAKVAPHNITYGILVDCCSRAGRLDLGFAAMGHIVKTGFAAGSVVSFSHLLRAVCAKKKTSYGMDIVLRIMPELNCIPDVYSYGILFKGLCNEKRSQEALELIHVMVEHGGSCQPNLVSYNTIIDGLLKEGEVGKAYILFCEMVQSGILANIVTYNSIISGMCKVHAMDKAEKVLQQMFDREILPDTATYTSLIHGYYSSGQCKEVERVFEHMSINGVQPNMITYNIQMDYLCKSGRCAEARKIFDSMVSLGQKPSVTTYSILLHGYVMEKSFHDMHCLLDLMVENGISPDHHVYKILISAYAKEEMASEVMHIFTKMRQQGLNPSVADYGAVINLLSSIGRMDDAMSQFNQMIAEGLAPDIIVFNPLISGFCTCGKWQKVHELFSEMLNRGTYPDTVFFTTIMDCICKNGRVMEAQDMFDLMVHVGVKPNVHTYATLMHGYFFVRKMDEVRKLLGNMLSIGSKPD

SEQ ID NO: 612 - protein, 593 aa, Triticum aestivum
MVSIGEHARPPNSAFLLPNPSSCPGCAGAVGGERRRRPLGPLPLPDSSRSIGGAMSRRAVPAGRRILEQNIKARYRAGAIGTDDALHLFDELLQVAWPSSIAAINCLLIVVGRDCPALAVSLFNHIARAKVAPHNITYGILVDCCSRAGRLDLGFAAMGHIVKTGFAAGSVVSFSHLLRAVCAEKKTSYGMDIVLRIMPELNCIPDVYSYSILFKGLCNEKRSQEALELIHVMVEHGGSCQPNLVSYNTVIDGLLKEGEVGKAYSLFCEMVQSGILANIVTYNSIISGMCKVHAMDKAEKVLQQMFDREILPDTATYTSLIHGYYSSGQCKEVERVFEHMSINGVQPNMITYNIQMDYLCKSGRCAEARKIFDSMVSLGQKPFVTTYSILLHGYVMEKSFHDMHCLLDLMVENGISPDHHVYNILISAYAKEEMASEVMHIFTKMRQQGLNPSVADYGAVINLLSSIGRMDDAMSQFNQMIAEGLAPDIIVFNPLISGFCTCGKWEKVHELFSEMLNRGTYPDTVFFTTIMDRLCKNGRVMEAQDMFDLMVHVGVKPNVHTYATLMHGYFFVRKMDEVRKLLGNMLSIGSKPD

SEQ ID NO: 613 - protein, 593 aa, Triticum aestivum
MVSIGEHARPPNSAFLLPNPSSCPGCVGAVGGERHRRPLGPLPLPDSSRSIGGAMSRRAVPAGRRILEQNIKARYRAGAIGTDDALHLFDELLQVAWPSSIAAINCLLIVVGRDCPALAVSLFNHIARAKVAPHNITYGILVDCCSRAGRLDLGFAAMGHIVKTGFAAGSVVSFSHLLRAVCAEKKTSYGMDIVLRIMPELNCIPDVYSYSILFKGLCNEKRSQEVLELIHVMVEHGGSCQPNLVSYNTVIDGLLKEGEVGKAYSLFCEMVQSGILANIVTYNSIISGMCKVHAMDKAEKVLQQMFDREILPDTATYTSLIHGCYSSGQCKEVERVFEHMSINGVQPNMITYNVQMDYLCKSGRCAEARKIFDSMVSLGQKPSVTTYSILLHGYVMEKSFHDMHCLLDLMVENGISPDHHVYNILISAYAKEEMASEVMHIFTKMRQQGLNPSVADYGAVINLLSSIGRMDDAMSQFNQMIAEGLAPDIIVFNPLISGFCTCGKWEKVHELFSEMLNRGTYPDTVFFTTIMDRLCKNGRVMEAQDMFDLMVHVGVKPNVHTYATLMHGYFFVRKMDEVRKLLGNMLSIGSKPD

SEQ ID NO: 614 - protein, 593 aa, Triticum aestivum
MVSIGEHARPPNSAFLLPNPSSCPGCVGAVGGERHRRPLGPLPLPDSSRSIGGAMSRRAVPAGRRILEQNIKARYRAGAIGTDDALHLFDELLQVAWPSSIAAINCLLIVVGRDCPALAVSLFNHIARAKVAPHNITYGILVDCCSHAGRLDLGFAAMGHIVKTVFATGSIVSFSHLLRAVCAEKKTSYGMDIVLRIMPELNCIPDVYSYSMLFKGLCNEKRSQEALEMIHVMVEHGGSCQPNLVSYNAIIDGLLKEGEVGKAYSLFCEMVQSGILANIVTYNSIISGMCKVHAMDKAEKVLQQMFDREILPDTATYTSLIHGCYSSGQCKEVERVFEHMSINGVKPNMITYNIQMDYLCKSGRCTEARKIFDSMVSLGQKPSVTTYSILLHGYVMEKSFHDMHCLLDLMVENGISPDHHVYNILISAYAKEEMASEVMHIFTKMRRQGLNPSVADYGAVINLLSSIGRMDDAMPQFNQMIAEVLAPDIIVFNPLISGFCTCGKWEKVHELFSEMLNRGTYPDTVFFTTIMDRLCKNGRVMEAQDMFDLMVHVGVKPNVHTYATLMHGYFFVRKMDEVRKLLGNMLSIGSKPD

SEQ ID NO: 615 - protein, 593 aa, Triticum aestivum
MVSIGEHARPPNSAFLLPNPSSCPGCAGAVGGERRRRPLGPLPLPDSSRSIGGAMSRRAVPAGRRILEQNIKARYRAGAIGTDDALHLFDELLQVAWPSSIAAINCLLIVVGRDCPALAVSLFNHIARAKVAPHNITYGILVDCCSRAGRLDLGFAAMGHIVKTGFAVGSIVSFSHLLRAVCAKKKTSYGMDIVLRIMPELNCIPDVYSYSILFKGLCNEKRSQEALELIHVMVEHGGSCQPNLVSYNTVIDGLLKEGEVGKAYILFCEMVQSGILANIVTYNSIISGMCKVHAMDKAEKVLQQMFDREILPDTATYTSLIHGYYSSGQCKEVERVFEHMSINGVQPNMITYNIQMDYLCKSGRCAEARKIFDSMVSLGQKPSVTTYSILLHGYVMEKSFHDMHCLLDLMVENGISPDHHVYNILISAYAKEEMASEVMHIFTKMRQQGLNPSVADYGAVINLLSSIGRMDDAMSQFNQMIAEGLAPNIIVFNPLISGFCTCGKWEKVHELFSEMLNRGTYPDTVFFTTIMDRLCKNGRVMEAQDMFDLMVHMGVKPNVHTYATLMHRYFFVRKMDEVRKLLGNMLSIGSKPD

SEQ ID NO: 616 - protein, 593 aa, Triticum aestivum
MVSIGEHARPPNSAFLLPNPSSCPGCAGAVGGERRRRPLGPLPLPDSSRSIGGAMSRRAVPAGRRILEQNIKARYRAGAIGTDDALHLFDELLQVAWPSSIAAINCLLIGVGRDCPALAVSLFNHIARAKVAPHNITYGILVDCCSRAGRLDLGFAAMGHIVKTGFAAGSVVSFSHLLRAVCAKKKTSYGMDIVLRIMPELNCIPDVYSYGILFKGLCNEKRSQEALELIHVMVEHGGSCQPNLVSYNTVIDGLLKEGEVGKAYILFCEMVQSGILANLVTYNSIISGMCKVHAMDKAEKVLQQMFDREILPDTATYTSLIHGYYSSGQCKEVERVFEHMSINGVQPNMITYNIQMDYLCKSGRCAEARKIFDSMVSLGQKPSVTTYSILLHGYVMEKSFHDMHCLLDLMVENGISPDHHVYKILISAYAKEEMASEVMHIFTKMRQQGLNPSVADYGAVINLLSSIGRMDDAMSQFNQMIAEGLAPDIIVFNPLISGFCTCGKWEKVHELFSEMLNRGTYPDTVFFTTIMDRLCKNGRVMEAQDKFDLMVHMGVKPNVHTYATLMHRYFFVMKMDEVRKLLGNMLSIGSKPD

SEQ ID NO: 617 - protein, 593 aa, Triticum aestivum
MVSIGEHARPPNSAFLLPNPSSCPGCAGAVGGERRRRPLGPLPLPDSSRSIGGAMSRRAVPAGRRILEQNIKARYRAGAIGTDDALHLFDELLQVAWPSSIAAINCLLIVVGRDCPALAVSLFNHIARAKVAPHNITYGILVDCCSRAGRLDLGFAAMGHIVKTGFAAGSVVSFSHLLRAVCAEKKTSYGMDIVLRIMPELNCIPDVYSYSILFKGLCNEKRSQEVLELIHVMVEHGGSCQPNLVSYNTVIDGLLKEGEVGKAYSLFCEMVQSGILANIVTYNSIISGMCKVHAMDKAEKVLQQMFDREILPDTATYTSLIHGCYSSGQCKEVERVFEHMSINGVQPNMITYNVQMDYLCKSGRCAEARKIFDSMVSLGQKPSVTTYSILLHGYVMEKSFHDMHCLLDLMVENGISPDHHVYNILISAYAKEEMASEVMHIFTKMRQQGLNPSVADYGAVINLLSSIGRMDDAMSQFNQMIAEGLAPDIIVFNPLISGFCTCGKWEKVHELFSEMLNRGTYPDTVFFTTIMDRLCKNGRVMEAQDMFDLMVHVGVKPNVHTYATLMHGYFFVRKMDEVRKLLGNMLSIGSKPD

SEQ ID NO: 618 - protein, 593 aa, Triticum aestivum; identical to SEQ ID NO: 611

SEQ ID NO: 619 - protein, 191 aa, Triticum aestivum
MHCLLDLMVENGISPDHHVYNILISAYAKEEMASEVMHIFTKIRQQGLNPSVADYGAVINLLSSIGRMDDAMSQFNQMIAEGLAPDIIVFNPLISGFCTCGKWEKVHELFSEMLNRGTYPDTVFFTTIMDRLCKNGRVMEAQDMFDLMVHVGVKPNVHTYATLMHGYFFVRKMDEVRKLLGNMLSIGSKPD

SEQ ID NO: 620 - protein, 245 aa, Triticum aestivum
  misc_feature (35)..(35): Xaa can be any naturally occurring amino acid
MITYNIQMDYLCKSGRCAEARKIFDSMVSLGQKPXVTTYSILLHGYVMEKSFHDMHCLLDLMVENGISPDHHVYNILISAYAKEEMASEVMHIFTKMRQQGLNPSVADYGAVINLHSSIGRMDDAMPQFNQMIAEGLAPDIIVFNPLISGFCTCGKWEKVHELFSEMLNRGTYPDTVFFTTIMDRLCKNGRVMEAQDMFDLMVHVGVKPNVHTYATLMHGYFFVRKMDEVRKLLGNMLSIGSKPD

SEQ ID NO: 621 - protein, 593 aa, Triticum aestivum
MVSIGEHARPPNSAFLLPNPSSCPGCAGAVGGERRRRPLGPLPLPDSSRSIGGAMSRRAVPAGRRILEQNIKARYRAGAIGTDDALHLFDELLQVAWPSSIAAINCLLIVVGRDCPALAVSLFNHIARAKVAPHNITYGILVDCCSRAGRLDLGFAAMGHIVKTGFAVGSIVSFSHLLRAVCAKKKTSYGMDIVLRIMPELNCIPDVYSYSILFKGLCNEKRSQEALELIHVMVEHGGSCQPNLVSYNTVIDGLLKEGEVGKAYILFCEMVQSGILANIVTYNSIISGMCKVHAMDKAEKVLQQMFDREILPDTATYTSLIHGYYSSGQCKEVERVFEHMSINGVQPNMITYNIQMDYLCKSGRCAEARKIFDSMVSLGQKPSVTTYSILLHGYVMEKSFHDMHCLLDLMVENGISPDHHVYNILISAYAKEEMASEVMHIFTKMRQQGLNPSVADYGAVINLLSSIGRMDDAMSQFNQMIAEGLAPDIIVFNPLISGFCTCGKWEKVHELFSEMLNRGTYPDTVFFTTIMDRLCKNGRVMEAQDMFDLMVHVGVKPNVHTYATLMHGYFFVRKMDEVRKLLGNMLSIGSKPD

SEQ ID NO: 622 - protein, 448 aa, Triticum aestivum
  misc_feature (428)..(428): Xaa can be any naturally occurring amino acid
  misc_feature (436)..(436): Xaa can be any naturally occurring amino acid
MGHIVKTGFAAGSVVSFSHLLRAVCAEKKTSYGMDIVLRIMPELNCIPDVYSYSILFKGLCNEKRSQEVLELIHVMVEHGGSCQPNLVSYNTVIDGLLKEGEVGKAYSLFCEMVQSGILANIVTYNSIISGMCKVHAMDKAEKVLQQMFDREILPDTATYTSLIHGCYSSGQCKEVERVFEHMSINGVQPNMITYNVQMDYLCKSGRCAEARKIFDSMVSLGQKPSVTTYSILLHGYVMEKSFHDMHCLLDLMVENGISPDHHVYNILISAYAKEEMASEVMHIFTKMRQQGLNPSVADYGAVINLLSSIGRMDDAMSQFNQMIAEGLAPDIIVFNPLISGFCTCGKWEKVHELFSEMLNRGTYPDTVFFTTIMDRLCKNGRVMEAQDMFDLMVHVGVKPNVHTYATLMHGYFFVRKMDEVRKLLGNXLSIGSKPXLGVLCFKVSARP

SEQ ID NO: 623 - protein, 593 aa, Triticum aestivum
MVSIGEHARPPNSAFLLPNPSSCPGCAGAVGGERRRRPLGPLPLPDSSRSIGGAMSRRAVPAGRRILEQNIKARYRAGAIGTDDALHLFDELLQVAWPSSIAAINCLLIVVGRDCPALAVSLFNHIARAKVAPHNITYGILVDCCSRAGRLDLGFAAMGHIVKTGFAAGSVVSFSHLLRAVCAEKKTSYGMDIVLRIMPELNCIPDVYSYSILFKGLCNEKRSQEVLELIHVMVEHGGSCQPNLVSYNTVIDGLLKEGEVGKAYSLFCEMVQSGILANIVTYNSIISGMCKVHAMDKAEKVLQQMFDREILPDTATYTSLIHGCYSSGQCKEVERVFEHMSINGVQPNMITYNVQMDYLCKSGRCAEARKIFDSMVSLGQKPSVTTYSILLHGYVMEKSFHDMHCLLDLMVENGISPDHHVYNILISAYAKEEMASEVMHIFTKMRQQGLNPSVADYGAVINLISSIGRMDDAMSQFNQMIAEGLAPDIIVFNPLISGFCTCGKWEKVHELFSEMLNRGTYPDTVFFTTIMDRLCKNGRVMEAQDMFDLMVHVGVKPNVHTYATLMHGYFFVRKMDEVRKLLGNMLSIGSKPD

SEQ ID NO: 624 - protein, 254 aa, Triticum aestivum
MSINGVQPNMITYNIQMDYLCKSGRCAEARKIFDSMVSLGQKPSVTTYSILLHGYVMEKSFHDMHCLLDLMVENGISPDHHVYNILISAYAKEEMASEVMHIFTKMWQQGLNPSVADYGAVINLLSSIGRMDDAMSQFNQMIAEGLAPDIIVFNPLISGFCTCGKWEKVHELFSEMLNRGTYPDTVFFTTIMDRLCKNGRVMEAQDMFDLMVHVGVKPNVHTYATLMHGYFFVRKMDEVRKLLGNMLSIGSKPD

SEQ ID NO: 625 - protein, 593 aa, Triticum aestivum
MVSIGEHARPPNSAFLLPNPSSCPGCASAVGGERRRRPLGPLPLPDSSRSIGGSMSRRAVPAGRRILEQNIKARYRAGAIGTDDAHHLFDELLQVAWPSSIATINCLLIVVGRDCPALAISLFNHIARAKVAPHNITYGILVDCCSRAGRLDLGFTAMGHIVKTGFAAGSVVSFSHLLRAVCAEKKTSYGMDIVLRIMPELNCIPDVYSYSTLFKGLCNEKRSQEALELIHVMVEHGGSCQPNLVSYNTVIDGLLKEGEVGKAYSLFCEMVQSGILANIVTYNSIIFDMCKVHAMDKAEKVLQQMFDREILPDTATYTSLIHGYYSSGQCKEVERVFEHMSINGVQPNMITYNIQMDYLCKSGRCAEARKIFDSMVSLGQKPSVTTYSILLHGYVMEKSFHDMHCLLDLMVENGISPDHHVYNILISAYAKEEMASEVMHIFTKMRQQGLNPSVADYGAVINLLSSIGRMDDAMSQFNQMIAEGLAPDIIVFNPLISGFCTCGKWEKVHELFSEMLNRGTYPDTVFFTTIMDRLCKNGRVMEAQDMFDLMVHVGVKPNVHTYATLMHGYFFVRKMDEVRKLLGNMLSIGSKPD

SEQ ID NO: 626 - protein, 593 aa, Triticum aestivum
MVSIGEHARPPNSAFLLPNPSSCPGCAGAVGGERRRRPLGPLPLPDSSRSIGGAMSRRAVPAGRRILEQNIKARYRAGAIGTDDALHLFDELLQVAWPSSIAAINCLLIVVGRDCPALVVSLFNHIARAKVAPHNITYVILVDCCSRAGRLDLGFAAMGHIVKTGFAAGSVVSFSHLLRAVCAEKKTSYGMDIVLRIMPELNCIPDVYSYSILFKGLCNEKRSQEALELIHVMVEHGGSCQPNLVSYNTVIDGLLKEGEVGKAYSLFCEMVQSGILANIVTYNSIIFGMCKVHAMDKAEKVLQQMFDREILPDTATYTSLIHGYYSSGQCKEVERVFEHMSINGVQPNMITYNIQMDYLCKSGRCAEARKIFDSMVSLGQKPSVTTYSILLHGYVMEKSFHDMHCLLDLMVENGISPDHHVYNILISAYAKEEMASEVMHIFTKMWQQGLNPSVADYGAVINLLSSIGRMDDAMSQFNQMIAEGLAPDIIVFNPLISGFCTCGKWEKVHELFSEMLNRGTYPDTVFFTTIMDRLCKNGRVMEAQDMFDLMVHVGVKPNVHTYATLMHGYFFVRKMDEVRKLLGNMLSIGSKPD

SEQ ID NO: 627 - protein, 593 aa, Triticum aestivum; identical to SEQ ID NO: 614

SEQ ID NO: 628 - protein, 593 aa, Triticum aestivum
MVSIGEHARPPNSAFLLPNPSSCPGCVGAVGGERHRRPLGPLPLPDSSRSIGGAMSRRAVPAGRRILEQNIKARYRAGAIGTDDALHLFDELLQVAWPSSIAAINCLLIVVGRDCPALAVSLFNHIARAKVAPHNITYGILVDCCSHAGRLDLGFAAMGHIVKTVFATGSIVSFSHLLRAVCAEKKTSYGMDIVLRIMPELNCIPDVYSYSMLFKGLCNEKRSQEALELIHVMVEHGGSCQPNLVSYNAIIDGLLKEGEVGKAYSLFCEMVQSGILANIVTYNSIISGMCKVHAMDKAEKVLQQMFDREILPDTATYTSLIHGCYSSGQCKEVERVFEHMSINGVQPNMITYNIQMDYLCKSGRCTEARKIFDSMVSLGQKPSVTTYSILLHGYVMEKSFHDMHCLLDLMVENGISPDHHVYNILISAYAKEEMASEVMHIFTKMRRQGLNPSVADYGAVINLLSSIGRMDDAMPQFNQMIAEVLAPDIIVFNPLISGFCTCGKWEKVHELFSEMLNRGTYPDTVFFTTIMDRLCKNGRVMEAQDMFDLMVHVGVKPNVHTYATLMHGYFFVRKMDEVRKLLGNMLSIGSKPD

SEQ ID NO: 629 - protein, 593 aa, Triticum aestivum; identical to SEQ ID NO: 606

SEQ ID NO: 630 - protein, 593 aa, Triticum aestivum
MVSIGEHARPPNSAFLLPNPSSCPGCVGAVGGERHRRPLGPLPLPDSSRSIGGAMSRRAVPAGRRILEQNIKARYRAGAIGTDDALHLFDELLQVAWPSSIATINCLLIVVGRDCPALAVSLFNHIARAKVAPHNITYGILVDCCSRAGRLDLGFAAMGHIVKTGFAAGSVISFSHLLRAVCAEKKTSYGMDIVLRIMPELNCIPDVYSYSILFKGLCNEKRSQEALELIHVMVEHGGSCQPNLVSYNTVIDGLLKEGEVGKAYSLFCEMVQSGILANIVTYNSIISGMCKVHAMDKAEKVLQQMFDREILPDTATYTSLIHGYYSSGQCKEVERVFEHMSINGVQPNMITYNIQMDYLCKSGRCAEARKIFDSMVSLGQKPSVTTYSILLHGYVMEKSFHDMHCLLDFMVENGISPDHHVYNILISAYAKEEMASEVMHIFTKMRQQGLNPSVADYGAVINLLSSIGRMDDAMSQFNQMIAEGLAPDIIVFNPLISGFCTCGKWEKVHELFSEMLNRGTYHDTVFFTTIMDRLCKNGRVMESQDMFDLMVHVGVKPNVHTYATLMHGYFFVRKMDEVRKLVGNMLSIGSKPD

SEQ ID NO: 631 - protein, 593 aa, Triticum aestivum; identical to SEQ ID NO: 606

SEQ ID NO: 632 - protein, 593 aa, Triticum aestivum
  misc_feature (522)..(522): Xaa can be any naturally occurring amino acid
MVSIGEHARPPNSAFLLPNPSSCPGCVGAVGGERHRRPLGPLPLPDSSRSIGGAMSRRAVPAGRRILEQNIKARYRARAIGTDDALHLFDELLQVAWPSSIAAINCLLIVVGRDCPALAVSLFNHIARAKVAPHNITYGILVDCCSRAGRLDLGFAAMGHIVKTGFAAGSVISFSHLLRAVCAEKKTSYGMDIVLRIMPELNCIPDVYSYSILFKGLCNEKRSQEALELIHVMVEHGGSCQPNLVSYNTVIDGLLKEGEVGKAYSLFCEMVQSGILANIVTYNSIISGMCKVHAMDKAEKVLQQMFDREILPDTATYTSLIHGYYSSGQCKEVERVFEHMSINGVQPNMITYNIQMDYLCKSGRCAEARKIFDSMVSLGQKPSVTTYSILLHGYVMEKSFHDMHCLLDFMVENGISPDHHVYNILISAYAKEEMASEVMHIFTKMRQQGLNPSVADYGAVINLLSSIGRMDDAMSQFNQMIAEGLAPDIIVFNPLISGFCTCGKWEKVHELFSEMLNRGTYXDTVFFTTIMDRLCKNGRVMEAQDMFDLMVHVGVKPNVHTYATLMHGYFFVRKMDEVRKLLGNMLSIGSKPD

SEQ ID NO: 633 - protein, 517 aa, Triticum aestivum
MRPCRTPLLDSTSPLSVLLLDHLHRNRPSPPPSASPPSAFWSPIAAFAAATKRARAGTLSPEDAHHLFDELLRQSNPVPNRFLNSFLAALARAPPSDACGDGPALTVALFNRLCREEAGPCVAPPTIYTYSILMDSCCRVGRPDLGLAVFGRLLKSGFKADQSTASSLLMCLCDVGRTNEAVDVLLHRISELGCEPNVIPYNIVLKSLCDSRRSQQALDLLQMMAQRGCCSPNVVSYNTVIHGLFKEGEVSMACSLFYEMMRQRVMPNVVTYRSMIGALCKVGATDKAKLVLGHMVGNGFRPDKYIWNSFMASLCKQGRSKEAAQLFDYMVAKGHKPDVVTYSTLLHGYATEGCFTDMINLFNSMEGNGIVANSCVFNILIDAYAKRGMMHEAMLIFTEMRERRVSPDIFTYGIIIAALCRMGRLSDAMEKINEMVATGLQPDKAVYYSLIQGFCTHDDLVKAKELVSEMMTKGIPRPNIVFFNSVIASLCKEGRVKDAHGIFDLALNIGERPDLIH

SEQ ID NO: 634 - protein, 517 aa, Triticum aestivum; identical to SEQ ID NO: 633

SEQ ID NO: 635 - protein, 517 aa, Triticum aestivum; identical to SEQ ID NO: 633

SEQ ID NO: 636 - protein, 517 aa, Triticum aestivum; identical to SEQ ID NO: 633

SEQ ID NO: 637 - protein, 517 aa, Triticum aestivum; identical to SEQ ID NO: 633

SEQ ID NO: 638 - protein, 517 aa, Triticum aestivum; identical to SEQ ID NO: 633

SEQ ID NO: 639 - protein, 593 aa, Triticum aestivum
MVSIGEHARPPNSAFLLPNPSSCPGCASAVGGERRRRPLGPLPLPDSSRSIGGSMSRRAVPAGRRILEQNIKARYRAGAIGTDDAHHLFDELLQVAWPSSIATINCLLIVVGRDCPALAISLFNHIARAKVAPHNITYGILVDCCSRAGRLDLGFTAMGHIVKTGFAAGSVVSFSHLLRAVCAEKKTSYGMDIVLRIMPELNCIPDVYSYSTLFKGLCNEKRSQEALELIHVMVEHGGSCQPNLVSYNTVIDGLLKEGEVGKAYSLFCEMVQSGILANIVTYNSIIFDMCKVHAMDKAEKVLQQMFDREILPDTATYTSLIHGYYSSGQCKEVERVFEHMSINGVQPNMITYNIQMDYLCKSGRCAEARKIFDSMVSLGQKPSVTTYSILLHGYVMEKSFHDMHCLLDLMVENGISPDHHVYNILISAYAKEEMASEVMHIFTKMRQQGLNPSVADYGAVINLLSSIGRMDDAMSQFNQMIAEGLAPNIIVFNPLISGFCTCGKWEKVHELFSEMLNRGTYPDTVFFTTIMDRLCKNGRVMEAQDMFDLMVHMGVKPNVHTYATLMHRYFFVRKMDEVRKLLGNMLSIGSKPD

SEQ ID NO: 640 - protein, 436 aa, Triticum aestivum
MGHIVKTGFAAGSVVSFSHLLRAVCAEKKTSYGMDIVLRIMPELNCIPDVYSYNILFKGLCNEKRSQEALELIHVMVEHGGSCQPNLVSYNTVIDGLLKEGEVGKAYSLFCEMVQSGILANIVTYNSIISGMCKVHAMDKAEKVLQQMFDREILPDTATYTSLIHGYYSSGQCKEVERVFEHMSINGVQPNMITYNIQMDYLCKSGRCAEARKIFDSMVSLGQKPSVTTYSILLHGYVMEKSFHDMHCLLDLMVENGISPDHHVYNILISAYAKEEMASEVMHIFTKIRQQGLNPSVADYGAVINLLSSIGRMDDAMSQFNQMIAEGLAPDIIVFNPLISGFCTCGKWEKVHELFSEMLNRGTYPDTVFFTTIMDRLCKNGRVMEAQDMFDLMVHVGVKPNVHTYATLMHGYFFVRKMDEVRKLLGNMLSIGSKPD

SEQ ID NO: 641 - protein, 590 aa, Triticum aestivum
  misc_feature (585)..(585): Xaa can be any naturally occurring amino acid
MVSIGEHARPPNSTFLLPNPSSCPGCAGAVGGERHRRPLGPLPLPDSSRSIGGAMSRRAVPAGRRILEQNIKARYRAGAIGTDDALHLFDELLQVAWPSSIAAINCLLIVVGRDCPALAVSLFNHIARAKVAPHNITYGILVDCCSRAGRLDLGFAAMGHIVKTGFAAGSVVSFSHLLRAVCAEKKTSYGMDIVLRIMPELNCIPDVYSYSILFKGLCNEKRSQEALELIHVMVEHGGSCQPNLVSYNTVIDGLLKEGEVGKAYSLFCEMVQSGILANIVTYNSIISGMCKVHAMDKAEKVLQQMFDREILPDTATYTSLIHGYYSSGQCKEVERVFEHMSINGVQPNMITYNIQMDYLCKSGRCAEARKIFDSMVSLGQKPFVTTYSILLHGYVMEKSFHDMHCLLDLMVENGISPDHHVYNILISAYAKEEMASEVMHIFTKMRQQGLNPSVADYGAVINLLSSIGRMDDAMSQFNQMIAEGLAPDIIVFNPLISGFCTCGKWEKVHELFSEMLNRGTYPDTVFFTTIMDRLCKNGRVMEAQDMFDLMVHVGVKPNVHTYATLMHGYFFVRKMDEVRKLLGNXSKQRF

SEQ ID NO: 642 - protein, 436 aa, Triticum aestivum
  misc_feature (430)..(430): Xaa can be any naturally occurring amino acid
MGHIVKTGFAAGSVVSFSHLLRAVCAEKKTSYGMDIVLRIMPELNCIPDVYSYSILFKGLCNEKRSQEALELIHVMVEHGGSCQPNLVSYNTVIDGLLKEGEVGKAYSLFCEMVQSGILANIVTYNSIISGMCKVHAMDKAEKVLQQMFDREILPDTATYTSLIHGYYSSGQCKEVERVFEHMSINGVQPNMITYNIQMDYLCKSGRCAEARKIFDSMVSLGQKPFVTTYSILLHGYVMEKSFHDMHCLLDLMVENGISPDHHVYNILISAYAKEEMASEVMHIFTKMRQQGLNPSVADYGAVINLLSSIGRMDDAMSQFNQMIAEGLAPDIIVFNPLISGFCTCGKWEKVHELFSEMLNRGTYPDTVFFTTIMDRLCKNGRVMEAQDMFDLMVHVGVKPNVHTYATLMHGYFFVRKMDEVRKLLGNMLXIGSKPD

SEQ ID NO: 643 - protein, 436 aa, Triticum aestivum; identical to SEQ ID NO: 640

SEQ ID NO: 644 - protein, 436 aa, Triticum aestivum; identical to SEQ ID NO: 640

SEQ ID NO: 645 - protein, 567 aa, Triticum aestivum
MSRRLVPVDRRILEQNIKARYHAGDIGTQDALHLFDELLQCAGSSSIRAINYLVTTVGRDCPALGVSLFNRVASANVAPNSITYTILVDCCCRAGRLDLGFAAMGHIIKMGFAADAIVTFSHLLNAICAEKKTSYAMDIVLRIMPMFNCVPNIFSYSILFKGLCNEKRSQEALELIQVMVEHGGSCQPNVVSYSTVIDGLLKEGLVGKAYSLFCEMLQRGISPNAVTCSSIISGMCKAQSMDKSEEVLQQMLDRRILPDVTTYNSLIHGYYSSGRCKEVDRIFQEMSRNGVQPNIVTYNIQMDYLCKSGRCAEARKIFDSMIGLGQKPDVTTYSILLHGSAMEKSFHEMHCLIDLMVGNGISPDHHVYNILMSAYAKEETVGEVMHIFTKMRQQGLNPNVANYGAAVNLLSKIGRMDDAMSQFNQMITEGLAPDIIVFTPLISGFCSCGKWEKVDELFSEMLDRGICPNTVFFNTIMDRLCKNERVMEAQDLFDLMVHMGVKPDVCTYSTLIGGYLFVGKMDEVSKLLDNMVSIGMEPDVITYNILMHLIYLIYIHLVCYVPWTYLI

SEQ ID NO: 646 - protein, 567 aa, Triticum aestivum
MSRRLVPVDRRILEQNIKARYHAGDIGTQDALHLFDELLQCAGSSSIRAINYLVTTVGRDCPALGVSLFNRVASANVAPNSITYTILVDCCCRAGRLDLGFAAMGHIIKMGFAADAIVTFSHLLNAICAEKKTSYAMDIVLRIMPMFNCVPNIFSYSILFKGLCNEKRSQEALELIQVMVEHGGSCQPNVVSYSTVIDGLLKEGLVGKAYSLFCEMLQRGISPNAVTCSSIISGMCKAQSMDKSEEVLQQMLDRRILPDVTTYNSLIHGYYSSGRCKEVDRIFQEMSRNGVQPNIVTYNIQMDYLCKSGRCAEARKIFDSMIGLGQKPDVTTYSILLHGSAMEKSFHEMHCLIDLMVGNGISPDHHVYNILISAYAKEETVGEVMHIFTKMRQQGLNPNVANYGAAVNLLSKIGRMDDAMSQFNQMITEGLAPDIIVFTPLISGFCSCGKWEKVDELFSEMLDRGICPNTVFFNTIMDRLCKNERVMEAQDLFDLMVHMGVKPDVCTYSTLIGGYLFVGKMDEVSKLLDNMVSIGMEPDVITYNILMHLIYLIYIHLVCYVPWTYLI

SEQ ID NO: 647 - protein, 567 aa, Triticum aestivum; identical to SEQ ID NO: 646

SEQ ID NO: 648 - protein, 567 aa, Triticum aestivum; identical to SEQ ID NO: 646

SEQ ID NO: 649 - protein, 567 aa, Triticum aestivum; identical to SEQ ID NO: 645

SEQ ID NO: 650 - protein, 567 aa, Triticum aestivum; identical to SEQ ID NO: 645

SEQ ID NO: 651 - protein, 593 aa, Triticum aestivum
MSGLRLRPRRSSSSTFPMPRSRLRHYASAMPMSSLRPLHRSSSSTTSPARAWSPHAAFAAATERVRAGALRPEDAHTLFDELLRQATPVPERSLNGFLAALARAPASGNCIRDGPALAVVLFNRVCREEAGPQVAALTGCTYSILMDCYCRARRPDLGLALFGRFLREGLKTHQIVANTFLKCLCYAKLTDEAVDVLLHRMSEFGCVPDAISYNTVLKSLCDNGMSQRGLELLQMIAKEVGVCSLNLVAYNTVIYGFFKEGETGKACNLFHEMMQQGVEPDVVTYNLIIDALCKARAMDKAEVVLQQMISKGAQPDTVTYNCMINGYATSGRLKKSAKMFREMKSRGLMPDIVTCNSFLSSLCKHGRSKEAREIFDSMTAKGHKPDIVSYRILLHGYASEGCFADMIDLFNSMKSNGIAADCRVFTILIGAYAKHGMMDDAMLIFTEMQQQGLSPNVVTYSTVISALSRMGRLANAMEKFNQMISMGVQPNKAVYHTLIQGSCMHGDLIKAKELVSEMMNKGIPHPSITFFGSIINSLCKDGRVMDAHDIFDLVIDIGERPSAITFNSLVDGYCLVGKMDKAFGMLNAMESLV

SEQ ID NO: 652 - protein, 593 aa, Triticum aestivum; identical to SEQ ID NO: 651

SEQ ID NO: 653 - protein, 593 aa, Triticum aestivum
MSGLRLRPRRSSSSTFPMPRSRLRHYASAMPMSSLRPLHRSSSSTTSPACAWSPHAAFAAATERVRAGALRPEDAHTLFDELLRQATPVPERSLNGFLAALARAPASGNCIRDGPALAVVLFNRVCREEAGPQVAALTGCTYSILMDCYCRARRPDLGLALFGRFLREGLKTHQIVANTFLKCLCYAKLTDEAVDVLLHRMSELGCVPDAISYNTVLKSLCDNGMSQRGLELLQMIAKEVGVCSLNLVAYNTVIYGFFKEGETGKACNLFHEMMQQGVEPDVVTYNLIIDALCKARAMDKAEVVLQQMISKGAQPHTVTYNCMINGYATSGRLKKSAKMFREMKSRGLMPDIVTCNSFLSSLCKHGRSKEAREIFDSMTAKGHKPDIVSYRILLHGYASEGCFADMIDLFNSMKSNGIAADCRVFTILIGAYAKHGMMDDAMLIFTEMQQQGLSPNVVTYSTVISALSRMGRLANAMEKFNQMISMGVQPNKAVYHTLIQGSCMHGDLIKAKELVSEMMNKGIPRPSITFFGSIINSLCKDGRVMDAHDIFDLVIDIGERPSAITFNSLVDGYCLVGKMDKAFGMLNAMESLV

SEQ ID NO: 654 - protein, 593 aa, Triticum aestivum; identical to SEQ ID NO: 651

SEQ ID NO: 655 - protein, 593 aa, Triticum aestivum; identical to SEQ ID NO: 653

SEQ ID NO: 656 - protein, 593 aa, Triticum aestivum; identical to SEQ ID NO: 651

SEQ ID NO: 657 - protein, 529 aa, Triticum aestivum
MVSIGEHARPPNSAFLLPNPSSCPGCAGAVGGERRRRPLGPLPLPDSSRSIGGAMSRRAVPAGRRILEQNIKARYRAGAIGTDDALHLFDELLQVAWPSSIAAINCLLIVVGRDCPALVVSLFNHIARAKVAPHNITYVILVDCCSRAGRLDLGFAAMGHIVKTGFAAGSVVSFSHLLRAVCAEKKTSYGMDIVLRIMPELNCIPDVYSYSILFKGLCNEKRSQEALELIHVMVEHGGSCQPNLVSYNTVIDGLLKEGEVGKAYSLFCEMVQSGILANIVTYNSIIFGMCKVHAMDKAEKVLQQMFDREILPDTATYTSLIHGYYSSGQCKEVERVFEHMSINGVQPNMITYNIQMDYLCKSGRCAEARKIFDSMVSLGQKPSVTTYSILLHGYVMEKSFHDMHCLLDLMVENGISPDHHVYNILISAYAKEEMASEVMHIFTKMRQQGLNPSVADYGAVINLLSSIGRMDDAMSQFNQMIAEGLAPDIIVFNPLISGFCTCGKWEKVHELFSEMLNRTSTGIRSSRQR

SEQ ID NO: 658 - protein, 490 aa, Triticum aestivum
MVSIGEHARPPNSAFILPNPSSCPGCAGAVGGERRRRPLGPLPLPDSSRSIGGAMSRRAVPAGRRILEQNIKARYRAGAIGTDDALHLFDELLQVAWPSSIAAINCLLIVVGRDCPAPAVSLFNHIARAKVAPHNITYGILVDCCSRAGRLDLGFAAMGHIVKTGFAAGSVVSFSHLLRAVYAKKKTSYGMDIVLRIMPELNCIPDVYSYSILFKGLCNEKRSQEALELIHVMVEHGGSCQPNLVSYNTVIDGLLKEGEVGKAYSLFCEMVQSGILANIVTYNSIIFGMCKVHAMDKAEKVLQQMFDREILPDTATYTSLIHGYYSSGQCKEVERVFEHMSINGVQPNMITYNIQMDYLCKSGRCAEARKIFDSMVSLGQKPSVTTYSILLHGYVMEKSFHDMHCLLDLMVENGISPDHHVYNILISAYAKEEMASEVMHIFTKMRQQGLNPSVAYIRHTQLVCLTGSAMSTHGPPRCSSCGLSITLRCF

SEQ ID NO: 659 - protein, 585 aa, Triticum aestivum
  misc_feature (464)..(464): Xaa can be any naturally occurring amino acid
MVSIGEHARPPNSTFLLPNPSSCPGCAGAVGGERHRRPLGPLPLPDSSRSIGGAMSRRAVPAGRRILEQNIKARYRAGAIGTDDALHLFDELLQVAWPSSIAAINCLLIVVGRDCPTLAVSLFNHIARAKVAPHNITYGILVDCCSRAGRLDLGFAAMGHIVKTGFAAGSVVSFSHLLRAVCAEKKTSYGMDIVLRIMPELNCIPDVYSYSILFKGLCNEKRSQEALELIHVMVEHGGSCQPNLVSYNTVIDGLLKEGEVGKAYSLFCEMVQSGILANIVTYNSIISGMCKVHAMDKAEKVLQQMFDREILPDTATYTSLIHGYYSSGQCKEVERVFEHMSINGVQPNMITYNIQMDYLCKSGRCAEARKIFDSMVSLGQKPFVTTYSILLHGYVMEKSFHDMHCLLDLMVENGISPDHHVYNILISAYAKEEMASEVMHIFTKMRQQGLNPSVADYGAVINLXSSIGRMDDAMPQFNQMIAEGLAPDIIVFNPLIRRSNHHFTLLSQLPLYPTLASPSSCSSFLQENPDLLLPLFFSPKEGKVSASMVLILAKARSCNPETDPITPSLFFFWVCDYGFFSFISI

SEQ ID NO: 660 - protein, 551 aa, Triticum aestivum
MVSIGEHARPPNSAFILPNPSSCPGCAGAVGGERRRRPLGPLPLPDSSRSIGGAMSRRAVPAGRRILEQNIKARYRAGAIGTDDALHLFDELLQVAWPSSIAAINCLLIVVGRDCPAPAVSLFNHIARAKVAPHNITYGILVDCCSRAGRLDLGFAAMGHIVKTGFAAGSVVSFSHLLRAVYAKKKTSYGMDIVLRIMPELNCIPDVYSYSILFKGLCNEKRSQEALELIHVMVEHGGSCQPNLVSYNTVIDGLLKEGEVGKAYSLFCEMVQSGILANIVTYNSIIFGMCKVHAMDKAEKVLQQMFDREILPDTATYTSLIHGYYSSGQCKEVERVFEHMSINGVQPNMITYNIQMDYLCKSGRCAEARKIFDSMVSLGQKPSVTTYSILLHGYVMEKSFHDMHCLLDLMVENGISPDHHVYNILISAYAKEEMASEVMHIFTKMRQQGLNPSVADYGAVINLLSSIGRMDDAMSQFNQMIAEGLAPNIIVFNPLISGFCTCGKWEKVHELFSEMLNRGTYPDTVFFTTIMDRLCKNGRVMEAQDMFGLMI

SEQ ID NO: 661 - protein, 580 aa, Triticum aestivum
MAHPPSKSNPSRAELQIESEIPQSHTSVRRPPSAGRARGWSSPARDRTHHRLRKKRARPLCPVSPPSVLLPPGLQVVAASIHRCCRKTATMSRLQVRSFSSPVSSRANDLLTELHGHLGFGTLRPELAHQLFDEMLRQPVLVSARALSGLFAALARAPPSPACTDGSALAIDLFNCMARAGRRQATVPTIYTYSILIECCHRTCRPDLGLAFFGRLLKTGIPTDIITYSNLFKCLCDMKRTEEALNVLLHRMPDDLPNVISYSVILKSFCDNGRSQLALDLLQMMAKKGANHSPDVMSYNMVIDGFFKEGESSKACDLFHELMQQGVVPDVVMCTSIINALCKARAMDKAEVVLRSMVHNGVQPDVVTYNSLIQGYSTLGQLKELARLLKVMRSQGVMPCVATYNSLMTCLCKNGRFKEAVEIFYSMAVKGQKPDVASYSIILHGYAKEGSLVDMIDLCQLMAANGVIPDLHCFNILIATYAEYGMTDVAMLFFEEMLKQGVHPNEVTYLSVIAGLCKTGRMDDATEKLGEMIDRGVPPDKTVYMCMMEGYFKHGDSLKAKEFITKMKNKDIPHRSQKGN

SEQ ID NO: 662 - protein, 304 aa, Triticum aestivum
MQRRKGYECTSIFDLVIGMGERPNVITFSSLIDGYGLVGQMGKALGVLDAMVSAGIEPNVVTYSSLLDGYCKNGRINDALILFREMPHKRIKPNTVTYGVMLDGLFRAGRTVAAREMFHEMTERGIPVSISIYNIILGGLCRNNCADEAIALFQKLGARNVKFDIITLNTMINAMFKVRRREEANDLFAAISASGLVPDASTYGIMIENILKEGSVEEVDNMFSSMEKSGCAPSSRLINYVIRMLLEKGEIARAGNYLSKVDGKIISLEASTTSLLLSLFSREGKYRENIELLPAKYQFFNGFG

SEQ ID NO: 663 - protein, 304 aa, Triticum aestivum; identical to SEQ ID NO: 662

SEQ ID NO: 664 - protein, 569 aa, Triticum aestivum
MMHQGVEPSVWTYSSIIDALCKARAMDKAELVLQQMVNKGVQPNNVTYNCMIHGYSTSGRWKEAAKLFREMKSRGLIPDTFTCNALMTYLCKHGRSKEAAEFFDAMTAKGHRNVNSYCILLHGYANEGCFADMIDLFNSMESNGFVADCHVFTILIDAYAKRGMMDEAMLIFTEMREKGVSPNVVTYSTVIAALCRLGRLSDAMDRFNEMTDMGVQPNTAVYRSLIQGFCMLGDLVKVKEFVSEMMNKGIPRPDIAFFTSVINSLCKEGRVMNAQGIFDLVIGMGERPNVIIFSSLIDGYGLVGQMGKALGVLDAMVSAGIEPNVVTYSSLLDGYCRNGRINDALILFREMPHKRIKPDTVTYGIMLDGLFRAGRTVAAREMFHEMTERGIPVSISIYNIILRGLCRNNCADEAIALFQKLGARNVKFDIITLNTMINAMFKVRRREEANDLFSAISASGLVPNASTYGIMIENILKEGSVEEVDNMFSSMEKSGCAPSSRLINYVIRMLLEKGEIARAGNYLSKVDGKIISLEASTTSLLLSLFSREGKYRENIELLPAKYQFFNGFG

SEQ ID NO: 665 - protein, 569 aa, Triticum aestivum; identical to SEQ ID NO: 664

SEQ ID NO: 666 - protein, 304 aa, Triticum aestivum; identical to SEQ ID NO: 662

SEQ ID NO: 667 - protein, 304 aa, Triticum aestivum; identical to SEQ ID NO: 662

SEQ ID NO: 668 - protein, 569 aa, Triticum aestivum; identical to SEQ ID NO: 664

SEQ ID NO: 669 - protein, 446 aa, Triticum aestivum
MLRQPVPVSARALGGLFSALARAPPSTACTDGPALAIDLFNCMTRVSRRRVIAPDIYTYNILIDCCHKACRPDLGPAFFGCLLKTGITMSVITYSSLFKCLCDMKRTDEALDVLLHRMPEDLPDIISYSVILKSFCDNGRSQCALDLLRMMAKKGTDHSPNVVSYNLVIDGFFKEGEGSKACDLFHEMIQQGPVPDVVTYTSVIVALCKARAMDKAEVVLRQMVHDGVQPNTVTYNSLIQGYSTLGQLKEVARLLKVMRSQGVLPSAVTCSSVMDYLCKHGRIKEAEEIFYSMAVNGRKPDIVSYSIMLLGYAMEGSLVKMIDLCELMARDGVVPDLRCFNILINAYAKYGRMDVAMLFFEDMLKQGVKPNEFTYLTVISVFCKMGRMDDAMEKFSEMIDMGVPPDTKVYMCMVEGYLNLGDSMKAKEFITKMKNMDIHHRPRKGN

SEQ ID NO: 670 - protein, 417 aa, Triticum aestivum
MRCCCRARRPGLGLAFFGRLLRTGLRTDGVDAYALIKCFCLAKRTDEAVSVRLHRLPELGRVPDALSYSVVLKVLCDDGRSQRALGLLQMMWKEGGGCAPNVVAYSTVIHGFCKEGKVSKACELFNEMVQQGVKPNVVTYTQVIDALCKARAMDKAESFLRHMVDNDVRPNNVTYKCIIQGYSSLGWWEEAVKIFRETTSRGLILDDVTRNSFVSSLCNHGRSKEAAEIAHQIIENGTTVSISTYGIILGELCRNDCTEEAIVLFHKLGAVDVKFDITIFNTMIDAMYRVRRREEANILFAAISANGLVPNASTYRIMITNLLKEGSMEEADHMFSSMETSGYAPSSVLLNDIIRMLLEKGEIVKAGNYLSKVDGKSISLEASTGLLMRHLFSTEGKYHEQIKSLPERYQYFGVRHS

SEQ ID NO: 671 - protein, 417 aa, Triticum aestivum; identical to SEQ ID NO: 670

SEQ ID NO: 672 - protein, 417 aa, Triticum aestivum; identical to SEQ ID NO: 670

SEQ ID NO: 673 - protein, 417 aa, Triticum aestivum; identical to SEQ ID NO: 670

SEQ ID NO: 674 - protein, 417 aa, Triticum aestivum; identical to SEQ ID NO: 670

SEQ ID NO: 675 - protein, 417 aa, Triticum aestivum; identical to SEQ ID NO: 670

SEQ ID NO: 676 - protein, 391 aa, Triticum aestivum
MPGFSSAASMSPLRLRLRLHARHSSASQPSRRQGWDPHAAFAAATECARSGNLTPEDAHNLFDELLRQGNPVLGRPLNNLLAALARAPASSACRDGPALVVALFSRISQGARLRVLHPTACTYGILMDCSCRAHRLDLAFAFFGRLLRTGLKAGVIEVNSLLKGLCHAKRADEAMEVLLHRMPELFIGVQGTAVYRSLIQGFCTHGDLVKAKEYVTEMMKKGMPPPDIMFFSSIMQNLCTEGRVIEARDILDLIVRIGMRPDVFIFNILIGGYCLVGKMEDASKIFDDMVSYGLEPCNFTYGILINGYCKNKRIDDGLILFKEMLRKGLKPTTFNYNVILDGLFLAGQTVAAKEKFDEMVESGVSVCIDTYSIVLGGLCRNSCSSEAITLF

SEQ ID NO: 677 - protein, 391 aa, Triticum aestivum; identical to SEQ ID NO: 676

SEQ ID NO: 678 - protein, 484 aa, Triticum aestivum
MSRLQVRSFSNSVSSHANELLDKLQGHLHSRTLRPDLVHQLFDEMLRQPVPVSVRALNGLFAALARAPSSTICTDAPALAIDLFNRMARAGRRQVPAPTIHTYSMLIECCQRACRPDLGLAFFGRLLKTGIKTNAITYSSLLKCLCDMKRTEEALGVLLHRMPDDLPNAISYSVILKSFCDSGRSQLVLDLLRMMAEKGSDHSPSVVSYSLVIDGFFKEGEISKACNLLHEMMQQGVVPDVVTYNSFIDALCKARAMEKAEVVLRSMVHNGVQPNAVTYSSLIQGYSTLGQLKEVARLLKAMRSQGSMPDVVICSSVMDYLCKHGRIKDAEEIFYSMAVNGRKPDIVSYTIMLHGYAIEGSLVKMIDLCELMARDGVVPDLRCAYAKYGMMDVAMLFLEDMLKQGVKPNEFTYLTVISAFCKMGRMDDAMEKFSEMIDMGVPVDTEVYMCMVEGYFNHGDSMKAEKFITKMKNRDIHHKLRKGN

SEQ ID NO: 679 - protein, 490 aa, Triticum aestivum
MSRLQVRSFSNSVSSHANELLDKLQGHLHSRTLRPDLVHQLFDEMLRQPVPVSVRALNGLFAALARAPSSTICTDAPALAIDLFNRMARAGRRQVPAPTIHTYSMLIECCQRACRPDLGLAFFGRLLKTGIKTNAITYSSLLKCLCDMKRTEEALGVLLHRMPDDLPNAISYSVILKSFCDSGRSQLVLDLLRMMAEKGSDHSPSVVSYSLVIDGFFKEGEISKACNLLHEMMQQGVVPDVVTYNSFIDALCKARAMEKAEVVLRSMVHNGVQPNAVTYSSLIQGYSTLGQLKEVARLLKAMRSQGSMPDVVICSSVMDYLCKHGRIKDAEEIFYSMAVNGRKPDIVSYTIMLHGYAIEGSLVKMIDLCELMARDGVVPDLRCFNILINAYAKYGMMDVAMLFLEDMLKQGVKPNEFTYLTVISAFCKMGRMDDAMEKFSEMIDMGVPVDTEVYMCMVEGYFNHGDSMKAEKFITKMKNRDIHHKLRKGN

SEQ ID NO: 680 - protein, 490 aa, Triticum aestivum
MSRLQVRSFSNSVSSHANELLDKLQGHLHSRTLRPDLVHQLFDEMLRQPVPVSVRALNGLFAALARAPSSTICTDAPALAIDLFNRMARAGRRQVPAPTIHTYSILIECCQRACRPDLGLAFFGRLLKTGIKTNAITYSSLLKCLCDMKRTEEALGVLLHRMPDDLPNAISYSVILKSFCDSGRSQLVLDLLRMMAEKGSDHSPSVVSYSLVIDGFFKEGEISKACNLLHEMMQQGVVPDVVTYNSFIDALCKARAMEKAEVVLRSMVHNGVQPNAVTYSSLIQGYSTLGQLKEVARLLKAMRSQGSMPDVVICSSVMDYLCKHGRIKDAEEIFYSMAVNGRKPDIVSYTIMLHGYAIEGSLVKMIDLCELMARDGVVPDLRCFNILINAYAKYGMMDVAMLFLEDMLKQGVKPNEFTYLTVISAFCKMGRMDDAMEKFSEMIDMGVPVDTEVYMCMVEGYFNHGDSMKAEKFITKMKNRDIHHKLRKGN

SEQ ID NO: 681 - protein, 490 aa, Triticum aestivum; identical to SEQ ID NO: 679

SEQ ID NO: 682 - protein, 490 aa, Triticum aestivum; identical to SEQ ID NO: 679

SEQ ID NO: 683 - protein, 490 aa, Triticum aestivum; identical to SEQ ID NO: 679

SEQ ID NO: 684 - protein, 542 aa, Triticum aestivum
MPRLSSTTPMSPPRLRLRLRGRHSSSTSHPSRIWDPHAAFAGATQRAHSGNLTPEDAHHLFDELLRQGNPVQERPLTNFLAALARAPASASCSDGPALAVALFGRLSRGAGRRVAQPNVFTYGVLMDCCCRACRPDLALAFFGRLFRKGLEANRVIFCTLLKGLCHAKRTDEALDVLLHRMPELGCTPNVVAYTTVIHGFFKEGQVGKACNLFHGMAQQGVAPNLVTYNSVIDALCKAKAMDKAEYFLGQMVDDGVVPDNVTYNSLIHGYSSSGHWKEAVRVFKEMTSRRVTADVHTYNMFMTFLCKHGRSKEAAGIFDTMAIKGLKPDNVSYAILLHGYATEGCLVDMINLFNSMERDCILPDCRIFNILINAYAKSGKLDKAMLIFNEMQKQGVSPNAVTYSTVIHTFCKKGRLDDAVIKFNQMIDTGVRQGTAVYGSLIQGFCTHGDLVKAKELLTEMMNKGMLPPDIKFFHSIMQNLCTEGRVIEARDVLGLIAHIGMRPDVCTFNILIGGYCLVGKMEDASKIFDDMMSYGLEPSNC

SEQ ID NO: 685 - protein, 542 aa, Triticum aestivum; identical to SEQ ID NO: 684

SEQ ID NO: 686 - protein, 537 aa, Triticum aestivum
MVEHGGSCQPNVVTYSTVIDGLLTEGEVNKAYSLFCEMLQRGISPNVVTCSSIISGMCKLHAMDKAEEVLQQMFERRILPDVATYTSLIHGYYSLGQCKEVDWILWEMSRNGVQPDIVTYNIQMDYLCKSGRCAKARKIFDSMVGLGQKPDVTTYNVLLHGYAMERSFHDMNCLIELMDDNGISPDHYGYNILISAYAKEKMVDEVMHIFTKMRQQGLNPDVVNYGAAVNLLSKIGRMDDAMSQFNQMITEGLAPDIIVFTPLISGFCSCGKWEKVDELFSEMLDRGICPNTVFFNTIMDRLCKNERVMEAQDLFDLMVHMGVKPDVCTYNTLIGGYLFVGKMDEVSKLLDNMVSIGMEPDVITYNILIDGYSKNGKIDDALVVFRGMLERKDKPSVITFNIMIGALLKCHRKEEAKDLFDGIWAKGLVPDVVTYSLMIQKLIEEGSLQESDDLFLSMEKNGCAADSRMLNAIVRSLLQKGDVPRAGTYLSKINERSFTLEGSTATLLTALASGGRGQEYKELLPEKYHSFLEQGID

SEQ ID NO: 687 - protein, 537 aa, Triticum aestivum; identical to SEQ ID NO: 686

SEQ ID NO: 688 - protein, 537 aa, Triticum aestivum; identical to SEQ ID NO: 686

SEQ ID NO: 689 - protein, 537 aa, Triticum aestivum; identical to SEQ ID NO: 686

SEQ ID NO: 690 - protein, 537 aa, Triticum aestivum; identical to SEQ ID NO: 686

SEQ ID NO: 691 - protein, 537 aa, Triticum aestivum; identical to SEQ ID NO: 686

SEQ ID NO: 692 - protein, 221 aa, Triticum aestivum
MIAVSLFNRLCREASPHASPLTVHTYGILTDCCCRARRPDLGLAFFGRLLRTGLRTDGVDAYALIKCFCLAKRTDEAVSVLLHRLPELGCAPDALSYSVVLKVLCDDGRSQRAFDLLQMMSKEGGGCAPNVVAYSTVIHGFCKEGKVSKACDLFDEMVQQGVKPNVVTYTSIIDALCKARAMDKAESFLRHMVDNDVRPAILSTLLDYIGLYFPPLYYFWD

SEQ ID NO: 693 - protein, 543 aa, Triticum aestivum
MAVMPRLHSTTPMPRLLRRLSSTSTSTSAPSRCWDPSAALAAATERVRAGTLRPADAHQLFDELLQQATPVPGPALNGFLAALARAPASAACTDSPALAVSLFNRLCREASPHASPLTVHTYGILTDCCCRARRPDLGLAFFGRLLRTGLRTDGVDAYALIKCFCLAKRTDEAVSVLLHRLPELGCAPDALSYSVVLKVLCDDGRSQRAFDLLQMMSKEGGGCAPNVVAYSTVIHGFCKEGKVSKACDLFDEMVQQGVKPNVVTYTSIIDALCKARAMDKAESFLRHMVDNDVRPNNVTYKYMIQGYSSLGWWEEAVKIFRETTSRGLILDDVTRNSFVASLCNHGRSKEAAEIARQMIETGTTVSISTYGIILGELCRNNCTEEAIVLFHKLGAVNVKFDITIFNTMIDAMYRVRRREEANILFAAISANGLVPNASTYRIMITNLLKEGSMEEADHMFSSMETSGYAPSSVLLNDIIRMLLEKGEIVKAGNYLSKVDGKSISLEDSTGLSMVHLFSREGKYHEQIKSLPAIYRFFGGVRHS

SEQ ID NO: 694 - protein, 544 aa, Triticum aestivum
MAVMPRFHSTTPTPRLLRRLSSTSASTSAPPRCWDPSAALTAATERVRAGTLSPADAHHLFDELLQRPTPVPGPALNGFLAALARAPASAACRDSPSLAVSIFNRLCREASPHGHASPLTAHTYGILMRCCCRARRPGLGLAFFGRLLRTGLRTDGVDAYALIKCFCLAKRTDEAVSVLLHRLPELGRVPDALSYSVVLKVLCDDGRSQRALGLLQMMWKEGGGCAPNVVAYSTVIHGFCKEGKVSKACELFNEMVQQGVKPNVVTYTSVIDALCKARAMDKAESFLRHMVDNDVRPNNVTYKCIIQGYSSLGWWEEAVKIFRETTSQGLILDDVTRNSFVSSLCNHGRSKEAAEIAHQIIENGTTVSISTYGIILGELCRNDCTEEAIVLFHKLGAVDVKFDITIFNTMIDAMYRVRRREEANILFAAISANGLVPNASTYRIMITNLLKEGSMEEADHMFSSMETSGYAPSSVLLNDIIRMLLEKGEIVKAGNYLSKVDGKSISLEASTGLLMRHLFSTEGKYHEQIKSLPERYQFFGVRHG

SEQ ID NO: 695 - protein, 293 aa, Triticum aestivum
MFDFILGIGRRPDVIMYNSLMDGYCLVGKVEEALRVLDAMKSAGLQPTAVTYAILLNGYCKIGRIADGLSLFREMSLSGVKPTTFMYNIIFDGLFRSGRAVSAKEKFRTMTESGIPVGVDTYYIVLHGLCKNNCTGEAIELFKKLRAMNVKIDVITLNTMISVMFKTRRIEEAKDLFATISAIGLVPSVVTYSVMMTNFIEEGLLAEADDMFLAMEKAGCAPDSRLLNHVVRVLLENGAVVKAATYLAKLDAKQLSVEASTVSLILSLFSRKGKLREHVKLLPVKYQPPEMLD

SEQ ID NO: 696 - protein, 534 aa, Triticum aestivum
MVDQGIEPNIKTYNCLIHGYSTFGQWKEALRVFKEMASLGVVPDVVTLTSLIDSLCKHRRTKEAREIFDSMAAKGLKPNIVSYSTMLNGYVKEGSFEDMTDLFNSMVRNGVVPNHHIFNILINAYAKRGLMDEAMHMFEVMRQQGVNPDVVDYLVIMDSLCKMGRMDAALDKFNQMVNQGVSPNKAVYQCLVLGSCSHGHFVKAKDLISEAINRGLFSNSVFFYPVINDLCKEGKVNEAQDMFDFILGIGRRPDVIMYNSLMDGYCLVGKVEEALRVLDAMKSAGLQPTAVTYAILLNGYCKIGRITDGLSLFREMSLSGVKPTTFMYNIIFDGLFCSGRAVSAKEKFRTMTESGIPVGVDTYNIVLHGLCKNNCTGEAIELFKKLRAMNVKIDVITLNTMISVMFKTRRIEEAKDLFATISAIGLVPSIVTYSVMMTNFIEEGLLAEADDMFLAMEKAGCAPDSRLLNHVVRVLLENGAVVKAATYLAKLDAKQLSVEASTVSLILSLFSRKGKLREHVKLLPVKYQPPEMLD

SEQ ID NO: 697 - protein, 534 aa, Triticum aestivum; identical to SEQ ID NO: 696

SEQ ID NO: 698 - protein, 293 aa, Triticum aestivum; identical to SEQ ID NO: 695

SEQ ID NO: 699 - protein, 208 aa, Triticum aestivum
MYNIIFDGLFRSGRAVSAKEKFRTMTESGIPVGVDTYNIVLHGLCKNNCTGEAIELFKKLRAMNVKIDVITLNTMISVMFKTRRIEEAKDLFATISAIRLVPSVVTYSVMMTNFIEEGLLAEADDMFLAMEKAGCAPDSRLLNHVVRVLLENGAVVKAATYLAKLDAKQLSVEASTVSLILSLFSRKGKLREHVKLLPVKYQPPEMLD

SEQ ID NO: 700 - protein, 384 aa, Triticum aestivum
MSRRFVPVDRRILERNIKARYHAGDIGTEDALNLFDELIQVAGPSSVLAINCLLTVVGRDCPALGVSLFNRVARAKVPPHNITYSILVDCCCRAGRLDLGHAAMGHVIKLGFAAEAIVNFSHLLKAICAEKKTSYAMDIVLRIMPEFNCIPNIFSYNILFKGLCNEKRSQEAPELIHIMAEDGGSCQPNVVSYNTVIDGLLKEGEVGQAYSLFCVMLQRGISPNVVTCTSIISGMCKVHAMDKAEEVLQQMTDRRILPDVATYNSLIHGYYSLGQCKEVDRIFKEMTRNGVQPNVVTYNIQMDYLCKSGRCAEARKIFDSMISLGQKPTVTTYNILLHGYAMERSFHDMNCIIELMDDNGISPDHYCYNILISAYKKKRATWCM

SEQ ID NO: 701 - protein, 545 aa, Triticum aestivum
MSRRFVPVDRRILERNIKARYHAGDIGTEDALNLFDELIQVAGPSSVLAINCLLTVVGRDCPALGVSLFNRVARAKVPPHNITYSILVDCCCRAGRLDLGHAAMGHVIKLGFAAEAIVNFSHLLKAICAEKKTNYAMDIVLRIMPEFNCIPNIFSYNILFKGLCNEKRSQEALELIHIMAEDGGSCQPNVVSYNTVIDGLLKEGEVGQAYSLFCVMLQRGISPNVVTCTSIISGMCKVHAMDKAEEVLQQMTDRRILPDVATYNSLIHGYYSLGQCKEVDRIFKEMTRNGVQPNVVTYNIQMDYLCKSGRCAEARKIFDSMISLGQKPTVTTYNILLHGYAMERSFHDMNCIIELMDDNGISPDHYCYNILTSAYAKEKMVDEVMHISTKMRQQGLNPDVENYGAVVNLLSKIGRMDDAMSQFNQMITEGLAPDIIVFTPLISGFCSCGKWEKVDELFSEMLDRGICPDTVFFNTVMDHLCKNGRVIEAQDVFDLMVHMGVKPDVRSHVTLMHGYFADGKMDEMRKLLENMCSIGLKLMLSPIAY

SEQ ID NO: 702 - protein, 543 aa, Triticum aestivum
MPRFSSSTPMSPPRLRLRLGGRHSSSTSHPSRIWDPHAAFATGTERAVFGTLTTEDAHHLFDELLRHGNPVQERSLNNFLATLARAPTSASCSDGPALAVALFGRLSRGAGRRVAQPNVFTYGVLMDCCCRARRLDLVIAFFGRLLKTGLEADRVVFSTLLKGLCHAKRSDEALDVLLHRMPGLGCTPGVVAYNTVIHGFFKEGQVGKACNLFHEMAQQGVMPDVVTYSSVIDALCKARAMDKAEYFLRQMVDDGVVPNNVTYNSLIHGYSSSGHWKEAVRVFKEMTSRRVTPDVHTYNMFMTFLCKHGRSKEAAGIFETMAMKGLKPNNVSYAILLHGYATEGCLVDMINLFNSMTRDGIRPNCHTLNILINAYAKSGMMDEAMLIFKGMRKQGVSPDVVTYSTVIHAFCKMGSLDIAMDKFNQMVDMGVRPNAVVYHSLIQSFCTHGDFVKAKELVTEMRNKGMRPPDINFFHSIMQNLCTEGRVTEARDILDLIVHIGMRPDVLIFSLLIDGYCLVSKMEDASKIFDDMVSYGLEPSNIT

SEQ ID NO: 703 - protein, 543 aa, Triticum aestivum; identical to SEQ ID NO: 702

SEQ ID NO: 704 - protein, 543 aa, Triticum aestivum; identical to SEQ ID NO: 702

SEQ ID NO: 705 - protein, 543 aa, Triticum aestivum; identical to SEQ ID NO: 702

SEQ ID NO: 706 - protein, 543 aa, Triticum aestivum; identical to SEQ ID NO: 702

SEQ ID NO: 707 - protein, 418 aa, Triticum aestivum
MDCCCRARRLDLVIAFFGRLLKTGLEADRVVFSTLLKGLCHAKRSDEALDVLLHRMPGLGCTPGVVAYNTVIHGFFKEGQVGKACNLFHEMAQQGVMPDVVTYSSVIDALCKARAMDKAEYFLRQMVDDGVVPNNVTYNSLIHGYSSSGHWKEAVRVFKEMTSRRVTPDVHTYNMFMTFLCKHGRSKEAAGIFETMAMKGLKPNNVSYAILLHGYATEGCLVDMINLFNSMTRDGIRPNCHTLNILINAYAKSGMMDEAMLIFKGMRKQGVSPDVVTYSTVIHAFCKMGSLDIAMDKFNQMVDMGVRPNAVVYHSLIQSFCTHGDFVKAKELVTEMRNKGMRPPDINFFHSIMQNLCTEGRVTEARDILDLIVHIGMRPDVLIFSLLIDGYCLVSKMEDASKIFDDMVSYGLEPSNIT

SEQ ID NO: 708 - protein, 517 aa, Triticum aestivum
MRPCRTPLLDSTSPLSVLLLDHLHRNRPSPPPSASPPSAFWSPIAAFAAATKRARAGTLSPEDAHHLFDELLRQSNPVPNRFLNNFLAALARAPPSDVCGDGPALTVALFNRLCREEAGPCVAPPTIYTYSILMDSCCRVGRPDLGLAVFGRLLKSGFKADQITASSLLMCLCDVGQTNEPVDVLLRRISKLGCEPNVIPYNIVLKSLCDSRRSQQALDLLLMMAQRGCRSPDVVSYNIVIHGLFKEGEVSMACSLFYEMMRQRVMPNVVTYRSMIGALCKVGATDKAKMVLGHMVGNGFRPDMYTWNSFMASLCKQGRSKEAAQLFDYMVAKGYKPDVVTYSTLLHGYATEGCFTDMINLFNSMEGNGIVANSCVFNILIDAYAKRGMMHEAMLIFTEMRERRVSPDIFTYGIIIAALCRMGRLSDAMEKINEMVAAGLQPDKAVYYSLIQGFCTHDDLVKAKELVSEMMTKGIPRPNIVFFNSVIASLCKEGRVKDAHGIFDLAMNIGERPDLIH

SEQ ID NO: 709 - protein, 268 aa, Triticum aestivum
MSLLRLRLRLHARRSYSTSHPPRSQGWDPHAAFAAATERARSGNLTSEDAHKLFDQLLLQANPVNMRLPNDLLTALARAPAFAACSNGPALAVALFSRLSQSARQRVVQPTACTHGILMDCCCRAHRLDLALAFFARLLRTGLKAGVIEVNTLLKGLCRAKRADEALDILLHRMPELGCTPNVVAYTTVIHGFFKEGQVSKACNLFHEMALQGVTPDVVTYNSVIDALCKARAMDKAEYFLGQMVDDGVVPDNVTYNSLIHGYSFSGH

SEQ ID NO: 710 - protein, 519 aa, Triticum aestivum
MSLLRLRLRLHARRSYSTSHPPRSQGWDPHAAFAAATERARSGNLTSEDAHKLFDQLLLQANPVNMRLPNDLLTALARAPAFAACSNGPALAVALFSRLSQGARQRVVQPTACTHGILMDCCCNAHRLDLALAFFARLLRTGLKAGVIEVNTLLKGLCRAKRAHEALDILLHRMPELGCTPNVVAYTTVIHGFFKEGQVSKACNLFHEMALQGVTPDVVTYNSVIDALCKARAMDKAEYFLGQMVDDGVVPDNVTYNSLIHGYSFSGHWKEAVRVFKQMTSRRVTADVHTYNMFMTFLCKHGRSKEAAGIFDTMAIKGLKPDNVSYAILLHGYATEGCLVDMINLFNSMERDCILPDCRIFNILINAYAKSGKLDKAMLIFNEMQKQGVSPNAVTYSTVIDAFCKKGQLDDAMIKFNQMIDTGIRQGTTVYGFCTHGDLVKAKELLTEMMNKGIPPPDIKFFHSIMQNLGTEGRVIEARDVLGLIAHIGMRPNVCTFNILSGGYCLSARWRMPQKYLMI

SEQ ID NO: 711 - protein, 246 aa, Triticum aestivum
MTSRRVTADVHTYNMFMNFLCKHGRSKEAAGIFDTMAIKGLKPDNVSYAILLHGYATEGCLVDMINLFNSMERDCILPDCRIFNILINAYAKFGKLDKAMLIFNEMQKQGVSPNAVTYSTVIDAFCKKGQLDDAMIKFNQMIDTGIRQGTTVYGSLIQGFCTHGDLVKAKELVTEMMNKGIPPPDIKFFHSIMQNLGTEGRVIEARDVLGLIAHIGMRPNVCTFNILSGGYCLSARWRMPQKYLMI

SEQ ID NO: 712 - protein, 553 aa, Triticum aestivum
MVSIGEHARPPNSAFLLPNPSSCPGCVGAVGGERHRRPLGPLPLPDSSRSIGGAMSRRAVPAGRRILEQNIKARYRAGAIGTDDALHLFDELLQVAWPSSIATINCLLIVVGRDCPALAVSLFNHIARAKVAPHNITYGILVDCCSRAGRLDLGFAAMGHIVKTGFAAGSVISFSHLLRAVCAEKKTSYGMDIVLRIMPELNCIPDVYSYSILFKGLCNEKRSQEALELIHVMVEHGGSCQPNLVSYNTVIDGLLKEGEVGKAYSLFCEMVQSGILANIVTYNSIISGMCKEVERVFEHMSINGVQPNMITYNIQMDYLRKSGRCAEARKIFDSMVSLGQKPYVTTYSILLNGYVMEKSFHDMHCLLDLMVENGILPDHHVYNILISAYAKEEMASEVMHIFTKMRQQGLNPSVADYGAVINLHSSIGRMDDAMPQFNQMIAEGLAPDIIVFNPLISGFCTCGKWEKVHELFSEMLNRGTYPDTVFFTTIMDRLCKNGRVMEAQDMFDLMVHVGVKPNVHTYATLMHGYFFVRKMDEVRKLLGNMLSIGSKPD

SEQ ID NO: 713 - protein, 553 aa, Triticum aestivum
MVSIGEHARPPNSAFLLPNPSSCPGCAGAVGGERRRRPLGPLPLPDSSRSIGGAMSRRAVPAGRRILEQNIKARYRAGAIGTDDALHLFDELLQVAWPSSIAAINCLLIVVGRDCPALAVSLFNHIARAKVAPHNITYGILVDCCSRAGRLDLGFAAMGHIVKTGFAAGSVVSFSHLLRAVCAKKKTSYGMDIVLRIMPELNCIPDVYSYSILFKGLCNEKRSQEALELIHVMVEHGGSCQPNLVSYNTVIDGLLKEGEVGKAYSLFCEMVQSGILANIVTYNSIISGMCKEVERVFEHMSINGVQPNMITYNIQMDYLCKSGRCAEARKIFDSMVSLGQKPSVTTYSILLHGYVMEKSFHDMHCLLDLMVENGISPDHHVYNILISAYAKEEMASEVMHIFTKMRQQGSNPSVADYGAVINLLSSIGRMDDAMSQFNQMIAEGLAPDIIVFNPLISGFCTCGKWEKVHELFSEMLNRGTYPDTVFFTTIMDRLCKNGRVMEAQDMFDLMVHVGVKPNVHTYATLMHGYFFVRKMDEVRKLLGNVLSIGSKPD

SEQ ID NO: 714 - protein, 553 aa, Triticum aestivum
MVSIGEHARPPNSTFLLPNPSSCPGCAGAVGGERHRRPLGPLPLPDSSRSIGGAMSRRAVPAGRRILEQNIKARYRAGAIGTDDALHLFDELLQVAWPSSIAAINCLLIVVGRDCPALAVSLFNHIARAKVAPHNITYGILVDCCSRAGRLDLGFAAMGHIVKTGFAAGSVVSFSHLLRAVCAKKKTSYGMDIVLRIMPELNCIPDVYSYSILFKGLCNEKRSQEALELIHVMVEHGGSCQPNLVSYNTVIDGLLKEGEVGKAYSLFCEMVQSGILANIVTYNSIISGMCKEVERVFEHMSINGVQPNMITYNIQMDYLCKSGRCAEARKIFDSMVSLGQKPSVTTYSILLHGYVMEKSFHDMHCLLDLMVENGISPDHHVYNILISAYAKEEMASEVMHIFTKMRQQGSNPSVADYGAVINLLSSIGRMDDAMSQFNQMIAEGLAPDIIVFNPLISGFCTCGKWEKVHELFSEMLNRGTYPDTVFFTTIMDRLCKNGRVMEAQDMFDLMVHVGVKPNVHTYATLMHGYFFVRKMDEVRKLLGNVLSIGSKPD

SEQ ID NO: 715 - protein, 553 aa, Triticum aestivum
MVSIGEHARPPNSAFLLPNPSSCPGCVGAVGGERHRRPLGPLPLPDSSRSIGGAMSRRAVPAGRRILEQNIKARYRAGAIGTDDALHLFDELLQVAWPSSIAAINCLLIVVGRDCPALAVSLFNHIARAKVAPHNITYGILVDCCSRAGRLDLGFAAMGHIVKTGFAAGSVVSFSHLLRAVCAKKKTSYGMDIVLRIMPELNCIPDVYSYSILFKGLCNEKRSQEALELIHVMVEHGGSCQPNLVSYNTVIDGLLKEGEVGKAYSLFCEMVQSGILANIVTYNSIISGMCKEVERVFEHMSINGVQPNMITYNIQMDYLCKSGRCAEARKIFDSMVSLGQKPSVTTYSILLHGYVMEKSFHDMHCLLDLMVENGISPDHHVYNILISAYAKEEMASEVMHIFTKMRQQGSNPSVADYGAVINLLSSIGRMDDAMSQFNQMIAEGLAPDIIVFNPLISGFCTCGKWEKVHELFSEMLNRGTYPDTVFFTTIMDRLCKNGRVMEAQDMFDLMVHVGVKPNVHTYATLMHGYFFVRKMDEVRKLLGNVLSIGSKPD

SEQ ID NO: 716 - protein, 553 aa, Triticum aestivum; identical to SEQ ID NO: 715

SEQ ID NO: 717 - protein, 510 aa, Triticum aestivum
MMSELGCVPNAFSYSIVLKGLCDNSMCQRALELLQMLVEKEGACSLNVVAYSTVIHGFFKEGETSKACNLFDEMIQQGIVPDVVTYSSIIDALCKARAMDKSELVLRQMVANGAQPNEVTYNCMIHGYSTSGRWKEAVKLFREMKSRGLIPDIFTCNSLMTYHCKHGRSKEAAEFFYSMTAKGHKPDIVSYRILLHGYATEGCFPDMIDVFNSMENNGIAADCHVFNILIDAYSKRGMMDETMLITSKMQERRVNPDIVTYSSIIAGLSRLGRLTEAMEKFNQMIALGVQPNKVVYHALIQGFCIDGDLAKAKQLVSEMMNRGIPRPNISFFSSVIKSLCQEGRVMDAHDIFDLVIDMGERPDDILLNSLIDGYCLVGKMDKALKVLDVMESVGVEPDVITYNTLVNGYCRNGRINDGLTLFRDMARKRIKPDTVFILRHNGWVVSFWEICFCYGAARRRAREGRPGAFLPTAGQEGRDFLLNSCLIRLIHLLSLYREVYLTPKQGLLDP

SEQ ID NO: 718 - protein, 510 aa, Triticum aestivum; identical to SEQ ID NO: 717

SEQ ID NO: 719 - protein, 510 aa, Triticum aestivum
MMSELGCVPNAFSYSIVLKGLCDNSMCQRALELLQMLVEKEGACSLNVVAYSTVIHGFFKEGETSKACNLFDEMIQQGIVPDVVTYSSIIDALCKARAMDKSELVLRQMVANGAQPNEVTYNCMIHGYSTSGRWKEAVKLFREMKSRGLIPDIFTCNSLMTYHCKHGRSKEAAEFFYSMTAKGHKPDIVSYRILLHGYATEGCFPDMIDVFNSMENNGIAADCHVFNILIDAYSKRGMMDETMLITSKMQERRVNPDIVTYSSIIAGLSRLGRLTEAMEKFNQMIALGVQPNKVVYHALIQGFCIDGDLAKAKQLVSEMMNRGIPRPNISFFSSVIKSLCQEGRVMDAHDIFDLVIDMGERPDDILLNSLIDGYCLVGKMDKALKVLDVMESVGVEPDVITYNTLVNGYCRNGRINDGLTLFSDMPRKRIKPDTVFILRHNGWVVSLWEICFCYGAARRRAREGRPGAFLPTAGQEGRDFLLNSCLIRLIHLLSLYREVYLTPKQGLLDP

SEQ ID NO: 720 - protein, 510 aa, Triticum aestivum
MMSELGCVPNAFSYSIVLKGLCDNSMCQRALELLQMLVEKEGACSLNVVAYSTVIHGFFKEGETSKACNLFDEMIQQGIVPDVVTYSSIIDALCKARAMDKSELVLRQMVANGAQPNEVTYNCMIHGYSTSGRWKEAVKLFREMKSRGLIPDIFTCNSLMTYHCKHGRSKEAAEFFYSMTAKGHKPDIVSYRILLHGYATEGCFPDMIDVFNSMENNGIAADCHVFNILIDAYSKRGMMDETMLITSKMQERRVNPDIVTYSSIIAGLSRLGRLTEAMEKFNQMIALGVQPNKVVYHALIQGFCIDGDLAKAKQLVSEMMNRGIPRPNISFFSSVIKSLCQEGRVMDAHDIFDLVIDMGERPDDILLNSLIDGYCLVGKMDKALKVLDVMESVGVEPDVITYNTLVNGYCRNGRINDGLTLFSDMPRKRIKPDIVFILRHNGWVVSFWEICFCYGAARRRAREGRPGAFLPTAGQEGRDFLLNSCLIRLIHLLSLYREVYLTPKQGLLDP

SEQ ID NO: 721 - protein, 510 aa, Triticum aestivum; identical to SEQ ID NO: 717

SEQ ID NO: 722 - protein, 469 aa, Triticum aestivum
MSNLRLLRRSSSSMSTTRSPLSRVWSPHSAFAAATERVRTGTLSQDDAHHLFDELLRQATPVHERSLNSFLAALAHATSSAACIRDGRALAIALFNRVCREQSGPRVVPLTVHTYNILMDCCCRASRPDLGLAFFARLLRTGLKTNEITANTFLKCLCYAKRTDEALNVLLHRMSELGCVPDAISYNIVLKSLCEDSMSQWALDLLQMMAKEGGGCSPNVVAYSTVIHGFFKEGETGKACNLFHEMMHQGVEPSVWTYSSIIDALCKARAMDKAELVLQQMVNKGVQPNNVTYNCMIHGYSTSGQWKEAAKLLREMKSRDLIPDIVTRNSFLASLCKHGRSKEAAEFLDSMTAKGHKPDIVSYRILFHGCASEGCFADMIDLFNSMESNGIAADCHVFNILINGYAKRGMTEEAMLIFTEMRGQGVSPDVVTYSIVIAALSRMGRLTDAIEKFNEMTALEVQPDTTVYC

SEQ ID NO: 723 - protein, 469 aa, Triticum aestivum; identical to SEQ ID NO: 722

SEQ ID NO: 724 - protein, 469 aa, Triticum aestivum; identical to SEQ ID NO: 722

SEQ ID NO: 725 - protein, 469 aa, Triticum aestivum; identical to SEQ ID NO: 722

SEQ ID NO: 726 - protein, 534 aa, Triticum aestivum
MSRRFPPGAMSRRILERKIQDRYHAGHIGTHDALNLFDELIQVAGPSSVRAINCLLTVVGRDCPALGVSLFNRVARAKVPPHNITYSILVDCCCRAGRLDLGHAAMGHVIKLGFAAEAIVNFSHLLKAICAEKKTSYAMDIVLRIMPEFNCIPDVFSYSILFKGLCNEKRSQEALELIHIMAEDGGSCQPNVVSYNTVLDGLLKEGEVGKAYSLFCVMLQRGISPNVVTCTSIISGMCKVHAMDKAEEVLQQMTNRGILPNSATYNSLIHGYYSLGQCEEVDRIFKEMSRNGVQPDIVTYNIQMDYLCKSRRCAEARKIFDSMVSLGQKPDVTTYSILLHGYAMEKSFHDMLCLIDLMVGNGIAPNHYVYNILISAYAKEEMVDEVMHIFRKMRQKGLNPDAVSYGTVIHLLSRIGRMDDAMCQFAQIITEGLAPDIIVFNSLISGFCSCGKWEKVHELFSEMLDCGICPDRVFFNTVMDHLCKNGRVMEAQDVFDLMVHMGVKPFVRDYNTLIHGYCLVGKMDEGRKLLDNMF

SEQ ID NO: 727 - protein, 517 aa, Triticum aestivum
MRPCRTPLLDSTSRLSVLLLDHLHRNRPSPPPSPSPPSAFWSPIAAFAAATKRARAGTLSPEDAHHLFDELLRQSIPVPNRFLNSFLAALARAPASDACGDGPALTVALFNRLCREEAGPCVAPPTIYTNNILMDSCCRVGRPDLGLAVFGRLLKSGLKADQITASSLLMCLCDVGRTNEAVDVLLHRISELGCEPNVIPYNIVLKSVCDSRRSQQALDLLQMMAQRGCCSPNVVSYNTVIHGLFKEGEVSMACSLFYEMMRQRVMPNVVTYRSMIGALCKVGATDKAKLVLGHMVGNGFQPDMYTWNSFMASLCKQGRGKEAAQLFDYMVAKGHKPDVVMYSTLLHGYATEGCFTDMINHFNSMEGNGIVANSRVFNILIDAYAKRGMMHEAMLIFTEMRERRVSPDIFTYGIIIAALCRMGRLSDAMEKINEMVATGLQPNEAVYYSLIQGFCTHDDLVKAKELVSEMMTKGIPRPNIVFFNSVIASLCKEGRVKDAHGIFDLAMNIGERPDLIH

SEQ ID NO: 728 - protein, 336 aa, Triticum aestivum
MLLHRMPGDMPDVISYSVIIKSFCDNGRSQRALDLLRMMTKKGSDHSPNVVSYTIIIGGLIKEGELSKACALFHEMMQQGVVPDVVTYSSIIDGLCKARALDEAEVVLRQMIDSGVRPNAVTYGSLIHGYSTSGQFEEVVRLLEEMRGQGVEPNLFTHNTVMDYLCKHGRTKEAAELFYSMAEKGHKPNMVSFSIMLHGYAIEGSLAEMTDLCELMARDGIVPNICIFNILINAYAKCGIMDVAMLFFEDMLKQGVTPDEVTYLAVIAGYCRMGRMDDAIKKFNEMIDMGVPHSLTIYRCMIHGYFRHGNFLKAKELITEMKNKGIRPCPRKKPKN

SEQ ID NO: 729 - protein, 531 aa, Triticum aestivum
MKFSAVPSLVECLTSAGHPPSSGLSSPTRSHIRHCRKEQDLPRLARLSSSSGSSQANQLLNKLKDHLGSGMLRPELAHQLFDKLFPQTVPVSADALNVLFSALACGLPSAACNDGPALAIALFKHMARTRCRQVMAPTNHTYNTLIECCHMARRPDIGPAFFGLLLKTGIMVDVFTFNSLLKCLCDMKQTDEALGVLLHRMPGDMPDVISYSVIIKSFCDNGRSQRALDLLRMMTKKRSDHSPNVVSYTIIIDGLIKEGELSKACALFHEMMQQGVVPDVVTYSSIIDGLCKARALDEADVVLRQMIDSGVRPNVVTYGSLIHGYSTSGQFEEVVRLLEEMRGQGVEPNLFTHNTVMDYLCKHGRTKEAAELFYSMAEKGHKPNMVSFSIMLHGYAIEGSLAEMTDLCELMARDSIVPNICIFNILINAYAKCGIMDVAMLFFEDMLKQGVTPDEVTYLAVIAGYCRMGRMDDAIEKFNEMIDMGVPHSLTIYRCIIHGYFRHGKFLKAKELITEMKNKGIRPCPRKKPKN

SEQ ID NO: 730 - protein, 336 aa, Triticum aestivum; identical to SEQ ID NO: 728

SEQ ID NO: 731 - protein, 336 aa, Triticum aestivum; identical to SEQ ID NO: 728

SEQ ID NO: 732 - protein, 336 aa, Triticum aestivum; identical to SEQ ID NO: 728

SEQ ID NO: 733 - protein, 336 aa, Triticum aestivum; identical to SEQ ID NO: 728

SEQ ID NO: 734 - protein, 336 aa, Triticum aestivum; identical to SEQ ID NO: 728

SEQ ID NO: 735 - protein, 503 aa, Triticum aestivum
MTNRSVTPDVCTYNLLMTSLYKNGNSKEAAQLFYSMATKGLKPDTVSYAILLHGYATEGCLVDMINLFNSMATDCILPNCHIFNILIYAYAKSGKLDKAMLIFKDMQKQGVSPDAVTYSTVIHAFCKKGRLDDAVTKFNQMIDTGVQPEASAYRSLIQGFCTHGDLVKAKEYVTEMMKKGMLPPDIMFFSSIMQKLCTEGRVIEARDILDLIVRIGMRPNVFIFNILIGGYCLGCKMEDATKMFEDMVSFGLEPCNITYGILINGYCKSRRIDDGLILFQEMLHKGLKPTTFNYNVILDGLFLAGRTIAAKEKFDEMVESGVSVCTDTYSIVLAGLCRNNCFSEVIMLFQKLRAMNMKFNIRIVTIIIDAFYKVRRNQEAKDLFAAIPSNGLVANVVTYSIMMKNLIKEGSVEEADTLFLSMEKSGCTANSWMLNHIIRRLLERGEIVKAGNYISKVDAKSYSLEAKTVSLLISLFSGKGKYREHIKLLPMKYQFLEEAATVE

SEQ ID NO: 736 - protein, 305 aa, Triticum aestivum
MTNRSVTPDVCTYNLLMTSLYKNGNSKEAAQLFYSMATKGLKPDTVSYAILLHGYATEGCLVDMINLFNSMATDCILPNCHIFNILIYAYAKSGKLDKAMLIFKDMQKQGVSPDAVTYSTVIHAFCKKGRLDDAVIKFNQMIDTGVRPEASAYRSLIQGFCTHGDLVKAKEYVTEMMKKGMLPPDIMFFSSIMQKLCTEGRVIEARDILDLIVRIGMRPNVFMFNILIGGYCLVCKMEDATKMFEDMVSFGLEPCNITYGILINGYCKNRRIDDGLILFQEMLHKGLKPTTFNYNVILDGLFLAG

SEQ ID NO: 737 - protein, 300 aa, Triticum aestivum
MPQLGVQPNVVIYTSIIDALSKCGAMDKAEVVLQQMVDQGIEPNIRTYTSLIHGYSASGQWKAAARVFKEMVSVGVLPNAVTLNSFMDSLCKHRRTKDARDIFDSMAAKGQKPDIFSYSIMLNGYAKEGYFEDMTDLFNLMVLNGIVPNHHIFNILINAYAKRGLMDEAMHMFEVMRQQGVNPNVVDYVVVMDSLCKMGRMDAALDKFTQMVNQGVSPNKAVYQCLVLGSCSHGHFVKAKELISEAINRGLFSNSVFFYPVINDLCKEGKVKEAQDMFDFILGIGRRPDVIMYNSLMDGY

SEQ ID NO: 738 - protein, 300 aa, Triticum aestivum; identical to SEQ ID NO: 737

SEQ ID NO: 739 - protein, 195 aa, Triticum aestivum
MAAKGQKPDIFSYSIMLNGYAKEGYFEDMTDLFNLMVLNGIVPNHHIFNILINAYAKRGLMDEAMHMFEVMRQQGVNPNVVDYVVVMDSLCKMGRMDAALDKFTQMVNQGVSPNKAVYQCLVLGSCSHGHFVKAKELISEAINRGLFSNSVFFYPVINDLCKEGKVKEAQDMFDFILGIGRRPDVIIYNSLMDGY

SEQ ID NO: 740 - protein, 432 aa, Triticum aestivum
MTTLLPRVSTGTRRGERKGSPRCPLRRPGGTHRRHRAGVGHSPDVFTYSTLVSALCRMGKLADAMDKFSEMIGTGVQPGTVVYHSLIQGFCTHGDLVKAKELVYEMMNKGSPCPNIAFFSSIVDSLCKEGRVMDAHHIFDLVKDIGERPDIIMFNTLIDGYCLVGEMEKACGVFDAMVSAVVEPDVITYSTLVSGYCKSGRIDDGLNLFTEMLHKKVKPTTVTYGTILDGLFCAGRSAAAKKVFHEMIESGIMVSISTYNIILGGLCRNNCADEAIVLFQKLCAMNVKFNITTLNTMLNAFYKVQRREEASDLFAALPASGLVPNASTYGVMIQNLLKEGAVEEADSMFSSMEKSGCAPSSRFLNYIIRTLLEKGEIDKAGKYMSKVDGKTILLEASTTSLLMSLFSRGGKYQEHILLLPAKYQLFSGVNHS

SEQ ID NO: 741 - protein, 432 aa, Triticum aestivum; identical to SEQ ID NO: 740

SEQ ID NO: 742 - protein, 432 aa, Triticum aestivum; identical to SEQ ID NO: 740

SEQ ID NO: 743 - protein, 432 aa, Triticum aestivum; identical to SEQ ID NO: 740

SEQ ID NO: 744 - protein, 416 aa, Triticum aestivum
MHIYAKRGLIDEAVLILTEMRGHGLSPDVFTYSTLVSALCRMGKLADAMDKFSEMIGTGVQPGTVVYHSLIQGFCTHGDLVKAKELVYEMMNKGSPCPNIAFFSSIVDSLCKEGRVMDAHHIFDLVKDIGERPDIIMFNTLIDGYCLVGEMEKACGVFDAMVSAVVEPDVITYSTLVSGYCKSGRIDDGLNLFTEMLHKKVKPTTVTYGTIPDGLFCAGRSAAAKKVFHEMIESGIMVSISTYNIILGGLCRNNCADEAIVLFQKSCAMNVKFNITTLNTMLNAFYKVQRREEASDLFAALPASGLVPNASTYGVMIQNLLKEGAVEEADSMFSSMEKSGCAPSSRFLNYIIRTLLEKGEIDKAGKYMSKVDGKTILLEASTTSLLMSLFSRGGKYQEHILLLPAKYQLFSGVNHS

SEQ ID NO: 745 - protein, 432 aa, Triticum aestivum; identical to SEQ ID NO: 740

SEQ ID NO: 746 - protein, 432 aa, Triticum aestivum; identical to SEQ ID NO: 740

SEQ ID NO: 747 - protein, 225 aa, Triticum aestivum
MVSYGMDEAMHMFEVMRQQGVNPDVFGYQIIMDSLCKMGKMDAALDKFNQMVNQGVSPNKAVYQCLVLGSCSHGDFVKAKELISEAVNRGMCSNSVFFYPVINDLCKEGKVKEAQDMFDFILGIGQRPDVIMYTSLMDGYCLVGKVEKALSVLDAMKFAGLQPDDVVYGTLLNSYCKIGRIADGLSLFRKCHSAGLSPRLLYTTLYWMGCFALGEQVLQRKNSIR

SEQ ID NO: 748 - protein, 225 aa, Triticum aestivum; identical to SEQ ID NO: 747

SEQ ID NO: 749 - protein, 470 aa, Triticum aestivum
  misc_feature (24)..(24): Xaa can be any naturally occurring amino acid
  misc_feature (251)..(252): Xaa can be any naturally occurring amino acid
  misc_feature (349)..(349): Xaa can be any naturally occurring amino acid
MDFTATDVFQHSPYGDILNSLKSXSLSGEPWPNCQAKRSNEALDMLLHRTPELHCAPDVFSYNIVINGCLKEGEVDKACNLFHEMPQLGVQPDVVTYTSIMDALSKSGAMDKAEVLLRQMVDQGIEPNIKTYSYLIHGYSTFGQWKEALRVFKEMASLGVVPDVVTLTSLIDSLCKHRRTKEARESFDSMAAKGLKPNIVSYSTMLNGYVKEGSFEDMTDLFNSMVRNGIVPNHHIFNILINAYAKRGGVXXEAMHMFEVMRQQGVNPDVFDYQIIMDSLCKMGRMDAALDKFNQMVNQGVSPNKAVYQCLVLGSCSHGHFVKAKELISEVVNRGLCSNSVFFYPVINXLCKEGKVKEAQDMFDFILGIGQRPDVIMYTSLMDGYCLVGKVEKALSVLDAMKFAGLQPDDVVYGTLLNSYCKIGRIADGLSLFRKCHSAGLSPRLLYTTLYWMGCFALGEQVLQRKNSIR

SEQ ID NO: 750 - protein, 225 aa, Triticum aestivum; identical to SEQ ID NO: 747

SEQ ID NO: 751 - protein, 509 aa, Triticum aestivum
MGEAELEPRGGGLGLRGDGGRCGRLGGVVVGPGRGAAAVPGARGGGWGWLFFGLLGGRRRRPGGQGSRSGGWLLRQRLQAWRGADPVVRDLPTHQGHASLLLHHANGATPPPPPTRLPPLLLHLSSLTHLGSPRRLRRRRRPRALWQPHRGGRTPPVRRIAAAGQSCPGPPPQQTSLRPRPCSGVRGLRRRPALAVALFSRISQGARRRVAEPTACTYGILMDCCSRACCPELALAFFARLLRSGLRVGVIEVRTLLKGLCHAKRAEEAMDVLLHRMPELGCTPGVVAYNTVINGFFKEGQVGKACSLFHGMPQRGVLPDVVTYTSVVDGLCKARAMDKAEYFLRQMVDSGVVPDNVTYNSLIHGYSSLGHQKEAVRVLKEMNRRVTPDVITCTSLMAFLCKNGKSKEAAEIFDSMATKGLKHDAVSYAILLHGYATEGCLVDMINLFNSMDRDCILPDGRIFNILINAYAKSGNLDKAMLIFKEMQKQGVSPDAVTYSTVIHAFCKKG

SEQ ID NO: 752 - protein, 288 aa, Triticum aestivum
MDCCSRACCPELALAFFARLLRSGLRVGVIEVRTLLKGLCHAKRAEEAMDVLLHRMPELGCTPGVVAYNTVINGFFKEGQVGKACSLFHGMPQRGVLPDVVTYTSVVDGLCKARAMDKAEYFLRQMVDSGVVPDNVTYNSLIHGYSSLGHQKEAVRVLKEMNRRVTPDVITCTSLMAFLCKNGKSKEAAEIFDSMATKGLKHDAVSYAILLHGYATEGCLVDMINLFNSMDRDCILPDGRIFNILINAYAKSGNLDKAMLIFKEMQKQGVSPDAVTYSTVIHAFCKKG

SEQ ID NO: 753 - protein, 509 aa, Triticum aestivum; identical to SEQ ID NO: 751

SEQ ID NO: 754 - protein, 509 aa, Triticum aestivum
  misc_feature (24)..(24): Xaa can be any naturally occurring amino acid
MGEAELEPRGGGLGLRGDGGRCGXLGGVVVGPGRGAAAVPGARGGGWGWLFFGLLGGRRRRPGGQGSRSGGWLLRQRLQAWRGADPVVRDLPTHQGHASLLLHHANGATPPPPPTRLPPLLLHLSSLTHLGSPRRLRRRRRPRALWQPHRGGRTPPVRRIAAAGQSCPGPPPQQTSLRPRPCSGVRGLRRRPALAVALFSRISQGARRRVAEPTACTYGILMDCCSRACCPELALAFFARLLRSGLRVGVIEVRTLLKGLCHAKRAEEAMDVLLHRMPELGCTPGVVAYNTVINGFFKEGQVGKACSLFHGMPQRGVLPDVVTYTSVVDGLCKARAMDKAEYFLRQMVDSGVVPDNVTYNSLIHGYSSLGHQKEAVRVLKEMNRRVTPDVITCTSLMAFLCKNGKSKEAAEIFDSMATKGLKHDAVSYAILLHGYATEGCLVDMINLFNSMDRDCILPDGRIFNILINAYAKSGNLDKAMLIFKEMQKQGVSPDAVTYSTVIHAFCKKG

SEQ ID NO: 755 - protein, 505 aa, Triticum aestivum
MPRVRPGSSSSTVSARANQQLLNKLKDHLDSGTLQPERAHQLFDKLLRQTVPVSACALNGLFASLARALPSAACTDGSALAIALFNRMAREGRRVIAPNIYTYSILIDCCCRSRRPDLGPAFFGFLLKTGIKADIITFTSLFKCLCDMKRIDEAVGVLLHRMPGDMPDVISYSTILKGFCNEGRSQLALNLLQMMVKKGAGHSPNVVSYNMVIDGFFKEGEVSKACNLFHEMKQRGVVPDVWTYNSIIDAMCKARAMDKAKLVLRQMVDSGVQPDIVTYNKLIHGYSISGQFEEVVRLLDKMRSQGVKPTVFTCNTVMDYLCKHGRIKEAAEFFYSMVEKGLKPNIVSYAIMFRGYAKEGSLVEMTDLCELMARDGIVPDLHCFNILINAYAKCGMMDVAIFFFKDMLKQGVNPDEVTYLAVIAGYCRVGMMDDAMENFNEMIGMGVPHNATVYRCMIQGYLNHGDFLKAKELITEMKTKGIHPRPRKSQGYLMTQLFTSMECWS

SEQ ID NO: 756 - protein, 505 aa, Triticum aestivum; identical to SEQ ID NO: 755

SEQ ID NO: 757 - protein, 504 aa, Triticum aestivum
MPRVRPGSSSSTVSARANQLLNKLKDHLDSGTLQPERAHQLFDKLLRQTVPVPASALNGLFAALARALPSAACTDGPALAIALFNRMAREGRRVIAPNIYTYSILIDCCCRSRRPDLGPAFFGFLLKTGIKADIITFTSLFKCLCDMKRIDEAVGVLLHRLPGDMPDVISYSTILKGFCNEGRSQLALNLLQMMVKKGAGHSPNVVSYNMVIDGFFKEGEVSKACNLFHEMKQRGVVPDVWTYNSIIDAMCKARAMDKAKLVLRQMVDSGVQPDIVTYNKLIHGYSISGQFEEVVRLLDKMRSQGVKPTVFTCNTVMDYLCKHGRIKEAAEFFYSMVEKGHKPNIVSYAIMFRGYAKEGSLVEMTDLCELMARDGIVPDLHCFNILINAYAKCGMMDVAILFFKDMLKQGVNPDEVTYLAVIAGYCRVGMMDDAMENFNEMIGMGVPHNATVYRCMIQGYLNHGDFLKAKELITEMKTKGIHPRPRKSQGIDPGYLMTQLFTGA

SEQ ID NO: 758 - protein, 505 aa, Triticum aestivum; identical to SEQ ID NO: 755

SEQ ID NO: 759 - protein, 505 aa, Triticum aestivum; identical to SEQ ID NO: 755

SEQ ID NO: 760 - protein, 504 aa, Triticum aestivum; identical to SEQ ID NO: 757

SEQ ID NO: 761 - protein, 475 aa, Triticum aestivum
MMQQGIVPNVVTYSSIIDALCKVRAMDKAKLVLQQMVDNGVQPDVVTWNSFMYSFCKHGKSKEAAEFFDSMTTKGLKPDIVAYSTLLHGYATEGCLADMINLFNTMEDNGIVANCNVFNILIDAYAKRGMMHEAMLIFTEMQEQRVSLDVCTYATVIAALCRMGRLADAMDKLNEMIAMGLQPNKVVYHSLIQGFCTHSDLVKAKALVSEMMNKGIPRPNIVFFSSVINSLCKEGRVTDAHDIFDLAINIGERPDVITFNSLIDGYCLAGKMDKAFGVLDAMVSAGIEHNVVTYNTLVDGYSRNGRIDDGLTLFREMTRNKIKPTTATYGAILHGLFRAGRTSSAKKMFNEMIESGTTVDIPIYAIILGGLCRNNCVDEAIILFEKLGAMNVKLDVGIFNTMINAVYTVKGREEAKDLFAAISANWLVPNASSYGVMITNLLREGLVEEADNMFSSMDKSGCAPSSRLLNIIIRM

SEQ ID NO: 762 - protein, 475 aa, Triticum aestivum; identical to SEQ ID NO: 761

SEQ ID NO: 763 - protein, 475 aa, Triticum aestivum; identical to SEQ ID NO: 761

SEQ ID NO: 764 - protein, 475 aa, Triticum aestivum; identical to SEQ ID NO: 761

SEQ ID NO: 765 - protein, 475 aa, Triticum aestivum; identical to SEQ ID NO: 761

SEQ ID NO: 766 - protein, 475 aa, Triticum aestivum; identical to SEQ ID NO: 761

SEQ ID NO: 767 - protein, 501 aa, Triticum aestivum
MLRRIRLRRRPYPSCTYPEPVLCHSSSFISAAPLLRLHQYRTTTTPMSRIHLRRRLFSSTTRPSHSWSPHAAFAAATERVRTGALSQDDAHHLFDELLRQATPVPGRSLNGFLAALARAPASGACRDGPALALALFNRVCLDESGARVAPPTIFTYGILMNCCCRAHRPDLGLAFLARLLRTGLKADQIVANTFLKCLCCAKRTDEAVNVLLHRMPRLGCVPNAFSYSIVLKSLCDNGMSRQALDLLHMMAKEGGGCSPNVVAYSTVIHGFFKEGETGKACNLFHEMMQQGVEPNVWTYSSIIDALCKARAMDKAELVLEKMVNKGVQPNNVTYNCMIHGYSTSGQLKEAAKMFREMTSQGLIPDNFTCSSLMTYLCKHGRSKEAAEFFDAMTAKGHRDVISYCILLHGYANEGCFADMIDLFNSMQRNGIAANCHVFNILINGYAKRGMTDEAMLIFTEMWEKGVSPDVVTYSTVIAALSRMGGLTDAMEKFNQMIAMGI

SEQ ID NO: 768 - protein, 490 aa, Triticum aestivum
  misc_feature (45)..(45): Xaa can be any naturally occurring amino acid
  misc_feature (47)..(47): Xaa can be any naturally occurring amino acid
  misc_feature (52)..(52): Xaa can be any naturally occurring amino acid
MWWRIARSSMAFLRRVKQGRHAVYSMTAKGQKPDIISYCTLLHGXAXEGCFXDMIDLFNSMKSNGIAADCRVFTILIDAYAKRGMMDDAMHIFTEMWEKGVSPDVVTYSTVIAALSRMGRLTDAMDKFNQMISMGVQPNTVVYHTLIQGSCMHGDLIKAKELVSEMMNKGIPRPSIAFFGSIINRLCKDGRVMDAHDIFDLVIDIGERPSVITFNSLVDGYCLVGKMDKAFGMLNAMESVGVEPDIVTYSTLLDGYFKNGRINDGLTLFREMPLKRIKPDTVTYGIMLDGCFRAGRTVAARTMFHEMIESGITVDIPTYNIVLRGLCRNNCTDEAIALFQKLGAMSMKFNIAILNTMINAIYKVRRREEANNLFAAISASGLVPNQSTYAVMIINLLKDGAVEHASNMFSSMEKSGIVPSSRLINGIIRLLLENGEIAKAGIYLSKVDGNSISLEASTTSLMLSLFSRKGKYQEDMKLLPAKYQFFGEFG

SEQ ID NO: 769 - protein, 503 aa, Triticum aestivum
MPRVRPGSSSSTVSSRANQLLNKLKDHLGSGTLQPERAHQLFDKLLRQTVPVSAFALNGLFAALARALPSAACTDGPALAIALFNRMAREGRRVIEPNIYTYNILIDCCCRSRHPDLGPAFFGFLLKTGIKADIITFNSLLKCLCDMMQMEEALNMLLYRMPELPDSISYSIIIKSLCDNGRSQCALDLLRMKAKKGADHYPGLVAYNRVINGLIKEGELSKACSLFHEMMQQGVVPNVVTYSSIIDALCKAGAMDKAEVALRQMVGNGVRPDIFTYTSLIHGYSISGQFEEVVRLLEKLRSQGVKPTVFTCNTVMDYLCKHGKIKEAAEFFYSMPEKGHKPNIVSYSIMLYGYAKEGSLVEMTDLCELMARDGIVPDLHCLNILINAYAKCGMMDVAMLFFKDMLKQGVNPDEVTYLAVITGYCRVGMMDDAMEKFNEMIDMGVPRNSTVYRCMIQGYLNHGDFLKAKVLTTEMKTKGIHPRPRKSQRIDSGYLMTQLFTGA

SEQ ID NO: 770 - protein, 503 aa, Triticum aestivum
MPRVRPGSSSSTVSSRANQLLNKLKDHLGSGTLQPERAHQLFDKLLRQTVPVSAFALNGLFAALARALPSAACTDGPALAIALFNRMAREGRRVIEPNIYTYNILIDCCCRSRHPDLGPAFFGFLLKTGIKADIITFNSLLKCLCDMMQMEEALNMLLYRMPELPDSISYSIIIKSLCDNGRSQCALDLLRMKAKKGADHYPGLVAYNRVINGLIKEGELSKACSLFHEMMQQGVVPNVVTYSSIIDALCKAGAMDKAEVALRQMVGNGVRPDIFTYTSLIHGYSISGQFEEVVRLLEKLRSQGVKPTVFTCNTVMDYLCKHGKIKEAAEFFYSMPEKGHKPNIVSYSIMLYGYAKEGSLVEMTDLCELMARDGIVPDLHCLNILINAYAKCGMMDVAMLFFKDMLKQGVNPDEVTYLAVITGYCRVGMMDDAMEKFNEMIDMGVPHNSTVYRCMIQGYLNHGDFLKAKVLTTEMKTKGIHPRPRKSQRIDSGYLMTQLFTGA

SEQ ID NO: 771 - protein, 503 aa, Triticum aestivum; identical to SEQ ID NO: 770

SEQ ID NO: 772 - protein, 503 aa, Triticum aestivum; identical to SEQ ID NO: 770

SEQ ID NO: 773 - protein, 503 aa, Triticum aestivum; identical to SEQ ID NO: 770

SEQ ID NO: 774 - protein, 503 aa, Triticum aestivum; identical to SEQ ID NO: 769

SEQ ID NO: 775 - protein, 303 aa, Triticum aestivum
MDCCCRARRPDLGLALFGRFLGTGLRTNEIVATTFLKCLCCAKRTEEVVKVLLHRMPELGCVPNAISYSIVLKSLCENSMSQQALDLLQMVGKEGGCLRDVVAYNTIIHGFFKEGGIDKACHLFHEMMRQGVVPTVVTYNTVIDALCKAGEMDKAELVFQQMARNGAQPNKVTCNGSKFSSLTDGYCSVGKMDKTFKLLDAMVSVGIEPDAVTYSALLDGYFKNGRIDDGLTLFREMSCKGVKPTTVTYGIILDGLYRAGRTAAAKKMFDQMIKSGITVTVSIYTTPSFPVYKAYFNFFVFPI

SEQ ID NO: 776 - protein, 303 aa, Triticum aestivum; identical to SEQ ID NO: 775

SEQ ID NO: 777 - protein, 303 aa, Triticum aestivum
MDCCCRARRPDLGLALFGRFLGTGLRTNEIVATTFLKCLCCAKRTEEVVKVLLHRMPELGCVPNAISYSIVLKSLCENSMSQQALDLLQMVGKEGGCLRDVVAYNTIIHGFFKEGGIDKACHLFHEMMRQGVVPTVVTYNTVIDALCKAGEMDKAELVFQRMARNGAQPNKVTCNGSKFSSLTDGYCSVGKMDKTFKLLDAMVSVGIEPDAVTYSALLDGYFKNGRIDDGLTLFREMSCKGVKPTTVTYGIILDGLYRAGRTAAAKKMFDQMIKSGITVTVSIYTTPSFPVYKAYFNFFVFPI

SEQ ID NO: 778 - protein, 303 aa, Triticum aestivum; identical to SEQ ID NO: 775

SEQ ID NO: 779 - protein, 504 aa, Triticum aestivum
MPNANGVKMFVISRYTVVLTFLVNFSHLLKAICAEKKTSYAMDIVLRVMPEFNYVPNIFSYNILFKGLCNEKRSQEALELIQIMVEDGGGCRPDVVTYSTVIDGLLKEGEVDQAYSLFSEMLRQGVSPNIVTCNSIISGMCKLHAMDKAEEVLQQMLDRRILPDVTTYTSLIHGYYSLGQCEEVDRVFKEMSRNGVQPNIITYSIQMDYLCKNGRCTEARKIFDSMVSLGQKPDVTTYSILLHGYAMERSFHDIHCLIDLMVENGLSPNNYIYNILISACAKEKMVDEAMHIFTKMRQQGLNPDAVSYGTVIDLLSSFGRMDDAMSLFNKMITEGLAPGIIVFNHLISGFCTCGKWVKVHELFSEMLDRGICPNTVFFNTIMDRLCKNGRVMDAQDLFDLMIHMGVKPDVCTYSTLIGGYLFVGKMDEVRKLLENMCSIGLKPDVVTYSILIDGYSKNGRIDDALVVIREMDGVKPSIITFNIMIGVLLKGSRMEEAKDLFDGI

SEQ ID NO: 780 - protein, 504 aa, Triticum aestivum
  misc_feature (204)..(204): Xaa can be any naturally occurring amino acid
  misc_feature (357)..(357): Xaa can be any naturally occurring amino acid
MPNANGVKMFVISRYTVVLTFLVNFSHLLKAICAEKKTSYAMDIVLRVMPEFNCVPNIFSYNILFKGLCNEKRSQEALELIQIMVEDGGGCRPDVVTYSTVIDGLLKEGEVDQAYSLFSEMLRQGVSPNIVTCNSIISGMCKLHAMDKAEEVLQQMLDRRILPDVTTYTSLIHGYYSLGQCEEVDRVFKEMSRNGVQPNIITYXIQMDYLCKNGRCTEARKIFDSMVSLGQKPDVTTYSILLHGYAMERSFHDIHCLIDLMVENGLSPNNYIYNILISACAKEKMVDEAMHIFTKMRQQGLNPDAVSYGTVIDLLSSFGRMDDAMSLFNKMITEGLAPGIIVFNHLISGFCTCGKWXKVHELFSEMLDRGICPNTVFFNTIMDRLCKNGRVMDAQDLFDLMIHMGVKPDVCTYSTLIGGYLFVGKMDEVRKLLENMCSIGLKPDVVTYSILIDGYSKNGRIDDALVVIREMDGVKPSIITFNIMIGVLLKGSRMEEAKDLFDGI

SEQ ID NO: 781 - protein, 504 aa, Triticum aestivum
MPNANGVKMFVISRYTVVLTFLVNFSHLLKAICAEKKTSYAMDIVLRVMPEFNCVPNIFSYNILFKGLCNEKRSQEALELIQIMVEDGGGCRPDVVTYSTVIDGLLKEGEVDQAYSLFSEMLRQGVSPNIVTCNSIISGMCKLHAMDKAEEVLQQMLDRRILPDVTTYTSLIHGYYSLGQCEEVDRVFKEMSRNGVQPNIITYIIQMDYLCKNGRCTEARKIFDSMVSLGQKPDVTTYSILLHGYAMERSFHDIHCLIDLMVENGLSPNNYIYNILISACAKEKMVDEAMHIFTKMRQQGLNPDAVSYGTVIDLLSSFGRMDDAMSLFNKMITEGLAPGIIVFNHLISGFCTCGKWEKVHELFSEMLDRGICPNTVFFNTIMDRLCKNGRVMDAQDLFDLMIHMGVKPDVCTYSTLIGGYLFVGKMDEVRKLLENMCSIGLKPDVVTYSILIDGYSKNGRIDDALVVIREMDGVKPSIITFNIMIGVLLKGSRMEEAKDLFDGI

SEQ ID NO: 782 - protein, 359 aa, Triticum aestivum
MDKAEEDLQQMHDRRILPDVTTYTSLIHGYYSLGQCEEVDRVFKEMSRNGVQPNIITYSIQMDYLCKNGRCTEARKIFDSMVSLGQKPDVTTYSILLHGYAMERSFHDIHCLIDLMVENGLSPNNYIYNILISACAKEKMVDEAMHIFTKMRQQGLNPDAVSYGTVIDLLSSFGRMDDAMSLFNKMITEGLAPGIIVFNHLISGFCTCGKWVKVHELFSEMLDRGICPNTVFFNTIMDRLCKNGRVMDAQDLFDLMIHMGVKPDVCTYSTLIGGYLFVGKMDEVRKLLENMCSIGLKPDVVTYSILIDGYSKNGRIDDALVVIREMDGVKPSIITFNIMIGVLLKGSRMEEAKDLFDGI

SEQ ID NO: 783 - protein, 504 aa, Triticum aestivum
  misc_feature (204)..(204): Xaa can be any naturally occurring amino acid
MPNANGVKMFVISRYTVVLTFLVNFSHLLKAICAEKKTSYAMDIVLRVMPEFNCVPNIFSYNILFKGLCNEKRSQEALELIQIMVEDGGGCRPDVVTYSTVIDGLLKEGEVDQAYSLFSEMLRQGVSPNIVTCNSIISGMCKLHAMDKAEEVLQQMLDRRILPDVTTYTSLIHGYYSLGQCEEVDRVFKEMSRNGVQPNIITYXIQMDYLCKNGRCTEARKIFDSMVSLGQKPDVTTYSILLHGYAMERSFHDIHCLIDLMVENGLSPNNYIYNILISACAKEKMVDEAMHIFTKMRQQGLNPDAVSYGTVIDLLSSFGRMDDAMSLFNKMITEGLAPGIIVFNHLISGFCTCGKWEKVHELFSEMLDRGICPNTVFFNTIMDRLCKNGRVMDAQDLFDLMIHMGVKPDVCTYSTLIGGYLFVGKMDEVRKLLENMCSIGLKPDVVTYSILIDGYSKNGRIDDALVVIREMDGVKPSIITFNIMIGVLLKGSRMEEAKDLFDGI

SEQ ID NO: 784 - protein, 504 aa, Triticum aestivum
MPNANGVKMFVISRYTVVLTFLVNFSHLLKAICAEKKTSYAMDIVLRVMPEFNCVPNIFSYNILFKGLCNEKRSQEALELIQIMVEDGGGCRPDVVTYSTVIDGLLKEGEVDQAYSLFSEMLRQGVSPNIVTCNSIISGMCKLHAMDKAEEVLQQMLDRRILPDVTTYTSLIHGYYSLGQCEEVDRVFKEMSRNGVQPNIITYSIQMDYLCKNGRCTEARKIFDSMVSLGQKPDVTTYSILLHGYAMERSFHDIHCLIDLMVENGLSPNNYIYNILISACAKEKMVDEAMHIFTKMRQQGLNPDAVSYGTVIDLLSSFGRMDDAMSLFNKMITEGLAPGIIVFNHLISGFCTCGKWVKVHELFSEMLDRGICPNTVFFNTIMDRLCKNGRVMDAQDLFDLMIHMGVKPDVCTYSTLIGGYLFVGKMDEVRKLLENMCSIGLKPDVVTYSILIDGYSKNGRIDDALVVIREMDGVKPSIITFNIMIGVLLKGSRMEEAKDLFDGI

SEQ ID NO: 785 - protein, 403 aa, Triticum aestivum
MSHSFSSSVSSCANELLNELHDHLGFRTLRPELAHQLFDEMLRQPVPVSVRALNDLFVALARAPPSTICTDGPALAIDLFNRMAQAGRRQVIAPTIITYNILIDCCHRACRPDLGHAFFGRLLKTGITMSVITYNSLFMCLCDMRRTKEALNMLLHRMPDDLPNVISYSVILKSFSDSGRSQLALDLLQMMAKKGADHSPDVMSYNIVIDGFFKEGEVSKACDLFQEMIRQGIVPTKVTYISIINALCKARAMDKVEVVLRSMVHNGVQPEAVTYSSMIQGYSTLGQLKEVARLLQVMRSQCCMPNVVTCSSVMDYLCKHGRIKEAEEIFYSMAVNGRKPNVISYSIMLHGYAIEGTLIKMIDLCELMARDGVVPDLRCFNILINAYAKYGMMDVAMLFFEDM

SEQ ID NO: 786 - protein, 403 aa, Triticum aestivum; identical to SEQ ID NO: 785

SEQ ID NO: 787 - protein, 403 aa, Triticum aestivum; identical to SEQ ID NO: 785

SEQ ID NO: 788 - protein, 403 aa, Triticum aestivum; identical to SEQ ID NO: 785

SEQ ID NO: 789 - protein, 403 aa, Triticum aestivum; identical to SEQ ID NO: 785

SEQ ID NO: 790 - protein, 403 aa, Triticum aestivum; identical to SEQ ID NO: 785

SEQ ID NO: 791 - protein, 481 aa, Triticum aestivum
MCKVHAMDKAEEVLQQMLDRRILPDAATYNSLIHGYYLLGQCEEVDRVLKEMCRKSVQPNIVTYYIQMDYLCKSGRCAEARKIFDSMIGLGQKPDVTTYSILLHGYAMEKSFHEMHCLIDLMVENGIAPDHHVYNILISAYAKEERVGEVVHIFTKMRQQGLNPNVANYGVVVNLLCSMGRMDDAMSQYNQMITEGLLPGIILFSQLISGFCTCGKWEKVHELFSEMLDRGIYPDTVFFNTIMDHLCKNGRVMEAQDLFDLMVHMGVKPDVCTYSTLIGGYLFVGKMDEVSKLLDNMVSIGMDPDVITYSILIDGYCKNGRIDDALVVFREMLAGKVKPCIITFNIMIGALLKGGRKEEAKDLFDGIWAKGLVPTVVTYSLMIQKLIEEGSLQESDDLFLSMEKNGCPANSRMLNAIVRRLLQKGEMPRAGTYLSKIDERNFTLEASTTSLLTALASVGKCQEYKGLLPEKYHSFLEQGTD

SEQ ID NO: 792 - protein, 481 aa, Triticum aestivum; identical to SEQ ID NO: 791

SEQ ID NO: 793 - protein, 481 aa, Triticum aestivum; identical to SEQ ID NO: 791

SEQ ID NO: 794 - protein, 481 aa, Triticum aestivum; identical to SEQ ID NO: 791

SEQ ID NO: 795 - protein, 481 aa, Triticum aestivum; identical to SEQ ID NO: 791

SEQ ID NO: 796 - protein, 481 aa, Triticum aestivum; identical to SEQ ID NO: 791

SEQ ID NO: 797 - protein, 482 aa, Triticum aestivum
MSRRFVPVGRRILEQNIKARYHAGDIGTEDALHLFDELLQVAGRSSIHAINCLLTVVCRDCPALGVSLFNRVARSKVAPSSITYAILVDCCCRAGRLDLGHTAMGHIIKTGFAAEAIVNFNHLLKAICAENKTSYAMDIVLRIMPMFNCVPNIFSYSILFKGLCNEKRSQEALELINMMVEDGGSCRPDVVTYNTVIDGLLKEGEVGKAYSLFCEMLRQGVSPDAVTCSSIISGMCKLHAMDKAEEVLQQMLDRRILPNVATYNSLIHGYYLLGQCEEVDRIFKEMSRNGVQPNVVTYNIQMDYLCKSGRCAEARKIFDSMISLGQKPNVYTYSVLLHGYAMEKSFHDMHCLIDLMVENGIAPDHHVYNILISAYAKEEMVGVVMHIFTKMRQQGLNPDAVSYGAVIDLLCSMGRMDDAMSQYNQMITEGLLPGIIVFTPLISGFCSCGKWEKVDELFSEMLDRGICPNSVLQHNYGPPLQK

SEQ ID NO: 798 - protein, 482 aa, Triticum aestivum; identical to SEQ ID NO: 797

SEQ ID NO: 799 - protein, 482 aa, Triticum aestivum; identical to SEQ ID NO: 797

SEQ ID NO: 800 - protein, 482 aa, Triticum aestivum; identical to SEQ ID NO: 797

SEQ ID NO: 801 - protein, 482 aa, Triticum aestivum; identical to SEQ ID NO: 797

SEQ ID NO: 802 - protein, 482 aa, Triticum aestivum; identical to SEQ ID NO: 797

SEQ ID NO: 803 - protein, 490 aa, Triticum aestivum
MSRLHPRYFSSSISSLADELLSELHHHLGSGTLSPQLAHQLFDEMLRQPVPVSSRALNGLFAALARTPPSTTCTDSPALAINLFNRMARAGRGRVIAPSSHTYSILIECCCLARRPDLGPSFFAHLLKTGVTADVVIFSGLFKCLCDMKRADEAQDILLHRIPDDLHDAISYSVILKSFCNNGLSQRALDLLRMMAKKGADHSPGVFAYSMVIHGFFKEGEVSKACDLFHEMIQQGPVPNVVTYNSVIDALCKARAMDKAEVVLRSMVHNGVQPNVVTYNSLIQGYSTVGQLKEVARLLKVMRSQGVMPSVVTYNSLMGYLCKHGRIKEAEEIFFSMTLNGRKPDIVSYSIMLRGYAIEGSLVKMIDLCELMARDGVVPELHCFNILISAYAKYGMMDVAMLFFEDMLKQGLNPGDFIYLTVISAFCKMGRMDDALEKFNEMIDRGVPLDTKIYMCMIEGYLNRGDSVKAEEFITKMKSRDIRHRPRKGN

SEQ ID NO: 804 - protein, 490 aa, Triticum aestivum; identical to SEQ ID NO: 803

SEQ ID NO: 805 - protein, 490 aa, Triticum aestivum; identical to SEQ ID NO: 803

SEQ ID NO: 806 - protein, 490 aa, Triticum aestivum; identical to SEQ ID NO: 803

SEQ ID NO: 807 - protein, 490 aa, Triticum aestivum; identical to SEQ ID NO: 803

SEQ ID NO: 808 - protein, 490 aa, Triticum aestivum; identical to SEQ ID NO: 803

SEQ ID NO: 809 - protein, 296 aa, Triticum aestivum
MAKKGADHSPNVVSYNTVINGFFKEGEVSKACNLFHEMIQQGVVPNEVTYSSIINALCKARAMDKAEVILRHMVHSGVQPHDRIYNILIHGFLTSGQLKEAFRLLKLMTSQGVMPNLVTCNSVMTYHCKNGRVKEAAEIFYSMAVKGRKPNVISYSIMLHGYATEGSLVEMIDLCELMARDGVVPDRSVFNILIKAYAKHGMIDVAMLFFDEMLKQGVNPNDITYLTLISAFCKMGRMDDAMIKFNEMIDMGIPHDTTVYMCMIEGYLNHGDSVKAKEFITKMKSRDVCHSPRKGN

SEQ ID NO: 810 - protein, 296 aa, Triticum aestivum; identical to SEQ ID NO: 809

SEQ ID NO: 811 - protein, 296 aa, Triticum aestivum; identical to SEQ ID NO: 809

SEQ ID NO: 812 - protein, 296 aa, Triticum aestivum; identical to SEQ ID NO: 809

SEQ ID NO: 813 - protein, 259 aa, Triticum aestivum
MIQQGVVPNEVTYSSIINALCKARAMDKAEVILRHMVHSGVQPHDRIYNILIHGFLTSGQLKEAFRLLKLMTSQGVMPNLVTCNSVMTYHCKNGRVKEAAEIFYSMAVKGRKPNVISCSIMLHGYATEGSLVEMIDLCELMARDGVVPDRSVFNILIKAYAKHGMIDVAMLFFDEMLKQGVNPNDITYLTLISAFCKMGRMDDAMIKFNEMIDMGIPHDTTVYMCMIEGYLNHGDSVKAKEFITKMKSRDVCHSPRKGN

SEQ ID NO: 814 - protein, 211 aa, Triticum aestivum
MSRLHPRYFSSSIPSLADELLSELHHHLGSGTLSPQLAHQLFDEMLRQPVPVSSRALNGLFAALARTPPSTTCTDSPALAINLFNRMARAGRGRVIAPSSHTYSILIECCCLARRPDLGPSFFAHLLKTGVTVDVVTFSGLFKCLCDMKRTEEALDVLLHKVPHNLPNVISYSVVVKSFCDNGRSQLALDLLRIMAKKGADHPPTWCHTTR

SEQ ID NO: 815 - protein, 490 aa, Triticum aestivum
MSRLHPRYFSSSIPSLADELLSELHHHLGSGTLSPQLAHQLFDEMLRQPVPVSSRALNGLFAALARTPPSTTCTDSPALAINLFNRMARAGRGRVIAPSSHTYSILIECCCLARRPDLGPSFFAHLLKTGVTVDVVTFSGLFKCLCDMKRTEEALDVLLHKVPHNLPNVISYSVVVKSFCDNGRSQLALDLLRIMAKKGADHSPNVVSYNTVINGFFKEGEVSKACNLFHEMIQQGVVPNEVTYSSIINALCKARAMDKAEVILRHMVHSGVQPHDRIYNILIHGFLTSGQLKEAFRLLKLMTSQGVMPNVVTCNSVMTYHCKNGRVKEAAEIFYSMAVKGRKPNVISYSIMLHGYATEGSLVEMIDLCELMARDGVVPDRSVFNILIKAYAEHGMIDVAMLFFDEMLKQGVNPNDITYLTLISAFCKMGRMDDAMIKFNEMIDMGIPHDTTVYMCMIEGYLNHGDSVKAKEFITKMKSRDVCHSPRKGN

SEQ ID NO: 816 - protein, 296 aa, Triticum aestivum; identical to SEQ ID NO: 809

SEQ ID NO: 817 - protein, 493 aa, Triticum aestivum
MSRLQPRYFSSSVSSRANELLSEFHHHLGSGTLWPELARQLFDQMLRQPVPVSVRALNGLFAALARAPPSTACTNAPALVIDLFNRMAQAGRRQVTAPTIYTYSILIECCHRACRPDLGLAFFGRLLQTGITTDVITYSSLLKCLCDMKRTEEALGVLLHRMPNDLPNVISYSVILKSFCDSGRSQLALDLLRMMAEKGSDHSPSVVSYSVVIDGFFKEGEISKACDLFHEMMQQGVVPDVVMYTSIINALCKARAMDKAEVVLRSMVHNGVQPDAVTYTSLIQGYSTLGQLKEVARLLKVMRSQGVMPDVVTCTLVMDYLCKHGRTKEAQEIFYSMAVNGQKPDIVAYCTMLYGYSIEGSLVDMIDLCELMARDGVVPNLRCFNILINAYAKHGMMDVALLFFEDMLKQGVKPNEFTYLTVISAFCKMGRMDDAMEKFREMIDMGVPVDTEVYMCMIEGYLNHGDSVKAKELITEMKNTDIRHKPWKGNGRT

SEQ ID NO: 818 - protein, 493 aa, Triticum aestivum; identical to SEQ ID NO: 817

SEQ ID NO: 819 - protein, 493 aa, Triticum aestivum; identical to SEQ ID NO: 817

SEQ ID NO: 820 - protein, 493 aa, Triticum aestivum; identical to SEQ ID NO: 817

SEQ ID NO: 821 - protein, 493 aa, Triticum aestivum; identical to SEQ ID NO: 817

SEQ ID NO: 822 - protein, 493 aa, Triticum aestivum; identical to SEQ ID NO: 817

SEQ ID NO: 823 - protein, 378 aa, Triticum aestivum
MPPRSWPAFFGRLLKTGITKDVVTYSSLFKCLCDMKRTEEALNVLLHKMPDDLPNVISYSVILKSFCDSGRSQLALDLLRMMAEKGSGHSPSVVSYSMVIDGFFKEGEISKACDLFHEMIQHGVVPTVVTYNSIIDARCKARAMDKAEVVLRSMVHNGVQPDAVTYNCLIQGYSTLGQLKEVARLLKVMRSQGVLPDVVTYNSLMTCLCKNGRLKEAVVFFYSMAMNGQKPDVISYSVLLHGYAKEGSLIDMIDLCERMARDGVVPNLHCFNILISAYAKYGRMDVAMLFFEDMLKKGLNPNEFIYLTVISAFCKMGRMDDALEKFNEMIDRGVPLDIKIYMCMIEGYLNHGDSVKAEEFITKMKSRDIHHRPRKGNC

SEQ ID NO: 824 - protein, 378 aa, Triticum aestivum; identical to SEQ ID NO: 823

SEQ ID NO: 825 - protein, 378 aa, Triticum aestivum
MPPRSWPAFFGRLLKTGITKDVVTYSSLFKCLCDMKRTEEALNVLLHKMPDDLPNVISYSVILKSFCDSGRSQLVLDLLRMMAEKGSGHSPSVVSYSMVIDGFFKEGEISKACDLFHEMIQHGVVPTVVTYNSIIDARCKARAMDKAEVVLRSMVHNGVQPDAVTYNCLIQGYSTLGQLKEVARLLKVMRSQGVLPDVVTYNSLMTCLCKNGRLKEAVVFFYSMAVNGQKPDVISYSVLLHGYAKEGSLIDMIDLCERMARDGVVPNLHCFNILISAYAKYGRMDVAMLFFEDMLKKGLNPNEFIYLTVISAFCKMGRMDDALEKFNEMIDRGVPLGIKIYICMIEGYLNHGDSVKAEEFITKMKSRGIRHRPRKGNC

SEQ ID NO: 826 - protein, 491 aa, Triticum aestivum
MSRLQVRSLSSSFSSRAYELLNELDGRLGSGTLSPEPARELFDEMLRQPVPVSVRALNGLFAALSRAPPSTIYTNAPALAIDLFNRMAQAGRRQVTAPDIYTYNILIDCCHRACRPDLGPAFFGRLLKTGITKDVVTYSSLFKCLCDMKRTEEALNVLLHKMPDDLPDAISYSVILKSFCDSGRSQLALDLLRMMTEKGSGHSPSVVSYSMVIDGFFKEGEISKACDLFHDMIQHGVVPTVVTYNSIIDARCKARAMDKAEVVLRSMVHNGVQPDAVTYNCLIQGYSTLGQLKEVARLLKVMRSQGVLPDVVTYNSLMTCLCKNGRFKEAVEIFYSMAVNGQKPDVISYSVLLHGYAKEGSLVDMIDLCERMARDGVVPNLHCFNILISAYAKYGRMDVAMLFFEDMLKKGLNPNEFIYLTVISAFCKMGRMDDALEKFNEMIDRGVPLDIKIYMCMIEGYLNHGDSVKAEEFITKMKSRDIRHRPRKGNC

SEQ ID NO: 827 - protein, 378 aa, Triticum aestivum; identical to SEQ ID NO: 823

SEQ ID NO: 828 - protein, 378 aa, Triticum aestivum; identical to SEQ ID NO: 823

SEQ ID NO: 829 - protein, 378 aa, Triticum aestivum; identical to SEQ ID NO: 825

SEQ ID NO: 830 - protein, 490 aa, Triticum aestivum
MSRLQVRSYSSPVSSRANDLLTELHGHMGFGTLRPELAHQLFDEMLGQPVPVSVRALNGLFAALARAPPSTACTDGPALAVDLFNHMARAGRRWMTAPTIHTYNILIDCCHRACRPDLGPAFFGCLLKTGVTTSPITYSSLFKCLCDMKRTEEALDILLHRIADDLPNVISYSVILKSFCDNGRSQLALDLLRVMAKKGGDRSPDVMLYNMVIDGFFKEGEVSKACDLFHEMIQQGVVPTEVTYSSIINALCKARAMDKAEVVLRHMVHNGVQPDVVTYTSLIKGYSTLGQLKEVARLLKVMRSQGVMPGIVTYTLVMDYLCKHGRIKEAEEIFYSMAVNGQKRDTVSYSIMLHGYAIEGSLVQMIDLCELMARDGVVPDLRCFNILINAYAKYGMMDAAMLFFEDMLKQGVKPNEFTYLTVISAFCKMGRMDDAMEKFNEMIDMGVPLDTEVYMCMVEGYFNLDDSIKAKEFITKLKNRDIHHRPRKGN

SEQ ID NO: 831 - protein, 490 aa, Triticum aestivum; identical to SEQ ID NO: 830

SEQ ID NO: 832 - protein, 490 aa, Triticum aestivum; identical to SEQ ID NO: 830

SEQ ID NO: 833 - protein, 490 aa, Triticum aestivum; identical to SEQ ID NO: 830

SEQ ID NO: 834 - protein, 490 aa, Triticum aestivum; identical to SEQ ID NO: 830

SEQ ID NO: 835 - protein, 490 aa, Triticum aestivum
MSRLQVRSYSSPVSSRANDLLTELHGHMGFGTLRPELAHQLFDEMLGQPVPVSVRALNGLFAALARAPPSTACTDGPALAVDLFNHMARAGRRWMTAPTIHTYNILIDCCHRACRPDLGPAFFGCLLKTGVTTSPITYSSLFKCLCDMKRTEEALDILLHRIADDLPNVISYSVILKSFCDSGRSQLALDLLRVMAKKGGDRSPNVMSYNMVIDGFFKEGEVSKACDLFHEMIQQGVVPTEVTYSSIINALCKARAMDKAEVVLRHMVHNGVQPDVVTYTSLIKGYSTLGQLKEVARLLKVMRSQGVMPDIVTYTLVMDYLCKHGRIKEAEEIFYSMAVNGQKRDTVSYSIMFHGYAIEGSLVQMIDLCELMARDGVVPDLRCFNILINAYAKYGMMDAAMLFFEDMLKQGVKPNEFTYLTVISAFCKMGRMDDAMEKFNEMIDMGVPLDTEVYMCMVEGYFNLDDSIKAKEFITKLKNRDIHHRPRKGN

SEQ ID NO: 836 - protein, 234 aa, Triticum aestivum
MDKAEVVLRSMVHNGAQPDAVTYNSLIQGYSTLGQLKEVARLLKVMRSQGVMPSVVTCNSLMTCLCKNGRFKEAVEFFYSMAVNGQKPDVISYSVLLHGYAKEGSLIDMIDLCERMARDGVVPDLHCFNILISAYAKYGRMDVAMLFFEDMLKKGLNPNEFIYLTVISAFCKMDRMDDALEKFNEMIDRGVPLDTKIYMCMIEGYLNHGDSVKAEEFITKMKSRDIRHRPWKGN

SEQ ID NO: 837 - protein, 404 aa, Triticum aestivum
MARAGRRQATAPTIYTYSILMECCHRACRPDLGLAFFGRLLKTGIPTNIIDYSSLFKCLCDMKRTEEALNVLLHKMPDDLPNVISYSVILKSFCDNGRSQLALDLLQMMAKKGADHSPDVMSYNMVIDGFFKEGEVSKACDLFQEMIRQGIVPTEVTYSSIINALCKARAMDKAEVVLRSMVHNGAQPDAVTYNSLIQGYSTLGQLKEVARLLKVMRSQGVMPSVVTCNSLMTCLCKNGRFKEAVEFFYSMAVNGQKPDVISYSVLLHGYAKEGSLIDMIDLCERMARDGVAPDLHCFNILISAYAKYGRMDVAMLFFEDMLKKGLNPNEFIYLTVISVFCKMGRMDDALEKFNEMIDRGVPLDTKIYMCMIEGYLNHGDSVKAEEFITKMKSRDIRHRLWKGN

SEQ ID NO: 838 - protein, 267 aa, Triticum aestivum
MSRFQVRSFSSSVSSRAHELLDELHDHLGFRTLRPELAHQLFDEMLRQPVPVSARALSGLFAALARAPPSPACTDSPALAIDLFNRMARAGRRQATAPTIYTYSILMECCHRACRPDLGLAFFGRLLKTGIKMDGITYSSLFKCLCDMKRTEEALNVLFHKMPDDLPNVISYSVILKSLCDNGRSQLALDLLQMMAKKGADHSPDVMSYNMVIDGFFKEGEVSKACDLFQEMIRQGIVPTEVTYSSIINALCKARGQGRGGSSINGS

SEQ ID NO: 839 - protein, 240 aa, Triticum aestivum
MRYAKQEDKAEVVLRSMVHNGAQLDAVTYNSLMQGYSTLGQLKEVARLLKVMRSQGVMPSVVTYNSLMTCLCKNGRFKEAVEFFYSMAVNGQKPDVISYSVLLHGYAKEGSLIDMIDLCERMARDGVVPDLHCFNILISAYAKYGRMGVAMLFFEDMLKKGLNPNEFIYLTVISAFCKMGRMDDALEKFNEMIDRGVPLDTKNYMCMIEGYLNHGDSVKAEEFITKMKSRDIRHRPWKGN

SEQ ID NO: 840 - protein, 267 aa, Triticum aestivum
MSRFQVRSFSSSVSSRAHELLDELHDHLGFRTLRPELAHQLFDEMLRQPVPVSARALSGLFAALARAPPSPACTDSPALAIDLFNRMARAGRRQATAPTIYTYSILMECCHRACRPDLGLAFFGRLLKTGIKMDVITYSSLFKCLCDMKRTEEALNVLFHKMPDDLPNVISYSVILKSLCDNGRSQLALDLLQMMAKKGADHSPDVMSYNMVIDGFFKEGEVSKAWDLFQEMIRQGIVPTEVTYSSIINALCKARGQGRGGSSINGS

SEQ ID NO: 841 - protein, 404 aa, Triticum aestivum
MARAGRRQATAPTIYTYSILMECCHRACRPDLGLAFFGRLLKTGIPTNIIDYSSLFKCLCDMKRTEEALNVLLHKMPDDLPNVISYSVILKSFCDNGRSQLALDLLQMMAKKGADHSPDVMSYNMVIDGFFKEGEVSKACDLFQEMIRQGIVPTEVTYSSIINALCKARAMDKAEVVLRSMVHNGAQPDAVTYNSLIQGYSTLGQLKEVARLLKVMRSQGVMPSVVTCNSLMTCLCKNGRFKEAVEFFYSMAVNGQKPDVISYSVLLHGYAKEGSLIDMIDLCERMARDGVVPDLHCFNILISAYAKYGRMDVAMLFFEDMLKKGLNPNEFIYLTVISAFCKMGRMDDALEKFNEMIDRGVPLDTKIYMCMIEGYLNHGDSVKAEEFITKMKSRDIRHRPWKGN

SEQ ID NO: 842 - protein, 490 aa, Triticum aestivum
MSQFQVRSFSSSVSSRAHELLDELHDHLGFRTLRPELAHQLFDEMLCQPVPVSARALSGLFAALARAPPSPACTDSPALAIDLFNRMARAGRRQATAPTIYTYSILMECCHRACRPDLGLAFFGRLLKTGIKTDVITYSSLFKCLCDMKRTEEALNVLFHKMPDDLPNVISYSVILKSFCDNGRSQLALDLLQMMAKKGADHSPDVMSYNMVIDGFFKEGEVSKACDLFQEMIRQGIVPTEVTYSSIINALCKARAMDKAEVVLRSMVHNGAQPDAVTYNSLIQGYSTLGQLKEVARLLKVMRSQGVMPSVVTCNSLMTCLCKNGRFKEAVEFFYSMAVNGQKPDVISYSVLLHGYAKEGSLIDMIDLCERMARDGVVPDLHCFNVLISAYAKYGRMDVAMLFFEDMLKKGLNPNEFIYLTVISAFCKMGRMDDALEKFNEMIDRGVPLDTKIYMCMIEGYLNHGDSVKAEEFITKMKSRDIRHRPWKGN

SEQ ID NO: 843 - protein, 267 aa, Triticum aestivum; identical to SEQ ID NO: 838

SEQ ID NO: 844 - protein, 267 aa, Triticum aestivum; identical to SEQ ID NO: 838

SEQ ID NO: 845 - protein, 240 aa, Triticum aestivum; identical to SEQ ID NO: 839

SEQ ID NO: 846 - protein, 267 aa, Triticum aestivum; identical to SEQ ID NO: 838

SEQ ID NO: 847 - protein, 267 aa, Triticum aestivum; identical to SEQ ID NO: 840

SEQ ID NO: 848 - protein, 260 aa, Triticum aestivum
MSRLQVRSFSSPVSSRANDLLTELHAHLGFGTLRPELAHQLFDEMLRQPVPVSARALSGLFAALARAPPSTACTDGPALAIDLFNHMARAGRRWMTAPTIHTYNILIDCCHRACRPDLGPAFFSRLLKTGITMSVITYSSLFKCLCDMKRTEEALGVLLHRMPDELPDVISYSVILKSFCDSGRSQLALDLLRMMAEKGSDHSPSVVSYSVVIDGFFKEGEISKACDLFHEMMQQGVVPDVVMYTSIINALCKARAMDKA

SEQ ID NO: 849 - protein, 490 aa, Triticum aestivum
MSRLQVRSFSSPISSRANDLLTELHGHLGFGTLRPELAHQLFDEMLRQPVPVSARALNGLFAALARAPPSTACTDGPALAVDLFNHMARAGRRWMTAPTIHTYNILIDCCHRACRPDLGPAFFSRLLKIGITMSVITYSSLFKCLCDMKRTEEALGVLLHRMPDDLPDVISYSVILKSFCDSGRSQLALDLLRMMAEKGSDHSPSVVSYSVVIDGFFKEGEISKACDLFHEMMQQGVVPDVVMYTSIINALCKARAMDKAEVVLRSMVHNGVQPDAVTYNSLIQGYSTLGQLKELARLLKVMRSQGVMPSVVTYNSLMTCLCKNGRFKEAVEIFYLMAMKGQKPDLISYSILLHGYAKEGSLIDMIDLCEQMARDGVVPDLHCFNILISAYAKYGRMDVAMLFFEDMLKKGLNPNEIIYLTVISAFCKMGRMDDALEKFNEMIDRGVLLDTKIYMCMIEGYLNHGDSVKAEEFITKMKSRDIRHRPRKGN

SEQ ID NO: 850 - protein, 484 aa, Triticum aestivum
MSRLQPRSFSSPVSSRVSELLDEFKCHLGSGTLWPELAHQLFDEMLRQPVPVSARALGGLFSALARARPSTACTDGPALAIDLFNRHRIAPDIYTYNILIDCCHRACRPDLGPAFFGCLLKTGITTDVITYSSLLQCFCDMKRTEEALDLLLHIVSDNLPDAISYSVILKSFCDNGRSQCALDLLQMMAKKGADHSPNVVSYNLVINGFFKEGEISKACDLFHEMIQQGFVPDVVTYNSVINALCKARAMDKAEVVLRSMVHNSVQPDVVTYNSLIQGFLTTGQLKEAFRLLKVMRSQGVMPSVVTCTSVMDYLCKHGRIKEAEETFYSMAASGRKPDTVSYSIMLLGYAIEGSLVKMIDLCEMMARDGVVPDLRCFNILIKAYAKYGRMDVAMLFFEDMLKQGVKPNEFTYLTVISAFCKMGRMDDAMEKFNEMIDMGVSLDTEVYMCMVEGYFNHGDSMKAEEFITKMKNRDIHHKPWKGNR

SEQ ID NO: 851 - protein, 484 aa, Triticum aestivum
MSRLQPRSFSSPVSSRVSELLDEFKYHLGSGTLWPELAHQLFDEMLRQPVPVSARALGGLFSALARARPSTACTDGPALAIDLFNRHRIAPDIYTYNILINCCHRACRPDLGPAFFGCLLKTGITTDVITYSSLLQCFCDMKRTEEALDLLLHRVSDNLPDAISYSVILKSFCDNGRSQCALDLLQMMAKKGADHSPNVVSYNLVINGFFKEGEISKACDLFHEMIQQGFVPDVVTYNSVINALCKARAMDKAEVVLRSMVHNSVQPDVVTYNSLIQGFLTTGQLKEAFRLLKVMRSQGVMPSVVTCTSVMDYLCKHGRIKEAEETFYSMAVSGRKPDTVSYSIMLLGYAIEGSLVKMIDLCEMMARDGVVPDLRCFNILIKAYAKYGRMDVAMLFFEDMLKQGVKPNGFTYLIVISAFCKMGRMDDAMEKFNEMIDMGVPLDTEVYMCMVEGYFNHGDSMKAEEFITKMKNRDIHHKPWKGNR

SEQ ID NO: 852 - protein, 484 aa, Triticum aestivum; identical to SEQ ID NO: 851

SEQ ID NO: 853 - protein, 484 aa, Triticum aestivum
MSRLQPRSFSSPVSSRVSELLDEFKYHLGSGTLWPELAHQLFDEMLRQPVPVSARALGGLFSALARARPSTACTDGPALAIDLFNRHRIAPDIYTYNILINCCHRACRPDLGPAFFGCLLKTGITTDVITYSSLLQCFCDMKRTEEALDLLLHRVSDNLPDAISYSVILKSFCDNGRSQCALDLLQMMAKKGADHSPNVVSYNLVINGFFKEGEISKACDLFHEMIQQGFVPDVVTYNSVINAPCKARAMDKAEVVLRSMVHNSVQPDVVTYNSLIQGFLTTGQLKEAFRLLKVMRSQGVMPSVVTCTSVMDYLCKHGRIKEAEETFYSMAVSGRKPDTVSYSIMLLGYAIEGSLVKMIDLCEMMARDGVVPDLRCFNILIKAYAKYGRMDVAMLFFEDMLKQGVKPNGFTYLIVISAFCKMGRMDDAMEKFNEMIDMGVPLDTEVYMCMVEGYFNHGDSMKAEEFITKMKNRDIHHKPWKGNR

SEQ ID NO: 854 - protein, 484 aa, Triticum aestivum; identical to SEQ ID NO: 851

SEQ ID NO: 855 - protein, 484 aa, Triticum aestivum; identical to SEQ ID NO: 851

SEQ ID NO: 856 - protein, 484 aa, Triticum aestivum; identical to SEQ ID NO: 851

SEQ ID NO: 857 - protein, 298 aa, Triticum aestivum
MSRRFPPGAMSRRILERKIQDRYRAGHIGTDDALNLFDELIQVAGPSSVRAINCLLTVVGRDCPALGVSLFNRVARAKVPPHNITYGILVDCCCRAGRLDLGHAAMGHVIKLGFTAEAIVNFSHLLKAICAEKKTSYAMDIVLRIMPEFNCVPNIFSYNILFKGLCNERRSQEAVELINIMVEDGRGCCRPDVVTYNTVIDGLLKEGEVGKAYSLFCEMPQRGISPDDVTWNSIISGMCKVHAMDKAEDVLEQMLDRGILPDVTTYNSLIHGYYSLGQCEEVDRISRKCLEMVFNQIL

SEQ ID NO: 858 - protein, 475 aa, Triticum aestivum
MAVCAEKKTSYGMDIVLRIMPELNCIPDVYSYSILFKGLCNEKRSQEALELIHMMVEHGGSCQPNLVSYNTVIDGLLKEGEVGKAYSLFCEMVQRGISPNIVTYNSIISGMCKVHATDKAEKVLQQMFDREFLPDTATYTSLIHGYYSSGQCKEVEQVFEHMSINGVQPNMITYNIQMDYHCKSGRCTEARKIFDSMVSLGQKPSVSTYSILLHGYAIEKSFHDMHCLLDLMVENGISPDHHVYNILISAYAKEEMASEVMHIFTKMRQQGLNPSVANYGAVINLLSSIGRMDDAMSQFNQMIAEGLAPDIIVFNPLISGFCTCGKWEKVHELFSEMLNRGIYPDTVFFTTIMDRLCKNGRVMEAQDMFDLMVHMGVKPNVHAYATLMHGYFFVRKMDEVRKLLGNMLSIGLKPDVFIYTILIDGYSKNGMIDNASAVFTEMLEKNIKPSAITYSTMLYGLFHAGLLLPLNYISG

SEQ ID NO: 859 - protein, 357 aa, Triticum aestivum
MDCSCRAHRLDLAFAFFGRLLRTGLKAGVIEVNSLLKGLCHAKRADEAMEVLLHRMPELFIGVQGTAVYRSLIQGFCTHGDLVKAKEYVTEMMKKGMPPPDIMFFSSIMQNLCTEGRVIEARDILDLIVRIGMRPDVFIFNILIGGYCLVGKMEDASKIFDDMVSYGLEPCNFTYGILINGYCKNKRIDDGLILFKEMLRKGLKPTTFNYNVILDGLFLAGQTVAAKEKFDEMVESGVSVCIDTYSIVLGGLCRNSCSSEAITLFRKLSAMNVKFNITIVNTIIGAFYRVERNQEAKDLFAAIPASGLVPNVLTYTIMIKNLIKEGSVEEANNLFLSMEKSGCSANSYLLNHIIRRC

SEQ ID NO: 860 - protein, 446 aa, Triticum aestivum
MLRQPVPISARALNGLFVALARAPPSTACTNASALAIDLFNRMAQAGRRQVTAPTIYTYNILIDCCHRACCPDLGPAFFGRRLKTGIPTDIITYSNLFKCLCDMKRTEEALGVLLHRMPDDLPDVISYSVILKSLCDNGRCQLALDLLRMIAEKGSDHSPSVVSYSMVIDGFFKEGEISKACDLFHEMMQQGVVPDVVTYSSVIDALCKARAMDKAEVVLRSMVHNGVQPDAVTYNCLIQGYSTLGQLKEVARLLKVMRSQGVMPSVVTYTSLMDYLCKHGRIKEAEEIFYSMAVNGRKPDIVSYSIMLRGYAIEGSLIDMIHLCELMARNGVVPDLYCFNILINACAKHGMMDVALLFFEDMLKQGVKPNEFTYLTVISAFCKMGRMDDAMEKFREMIDMGVPVDTEVYMCMVEGYFKNGDSVKAKDFITKMKNKDISNRPQKGN

SEQ ID NO: 861 - protein, 446 aa, Triticum aestivum; identical to SEQ ID NO: 860

SEQ ID NO: 862 - protein, 446 aa, Triticum aestivum; identical to SEQ ID NO: 860

SEQ ID NO: 863 - protein, 446 aa, Triticum aestivum; identical to SEQ ID NO: 860

SEQ ID NO: 864 - protein, 446 aa, Triticum aestivum; identical to SEQ ID NO: 860

SEQ ID NO: 865 - protein, 446 aa, Triticum aestivum; identical to SEQ ID NO: 860

SEQ ID NO: 866 - protein, 477 aa, Triticum aestivum
MSRLQPRSSRANELLDEFKYHLGSGTLWPELAHQLFDELLRQPVPVSARALNGLFAALADAPPSANCADGPALAINLFNRHRISPNIYTYNILIECCHRACRPDLGPAFFGRLLKAGITMSVITYNSLFKCLCDMKRTEEASDVLLHRMPDDLPDVISYSVILKSFCDSGRSQRALDLLRVMAKKGGDYSPNVISYNMVMDGFFKEGEVSKARVLFHEMIQQGVVPTEVTYSSIINALCKARAMDKAEVILRHMVRSGVQPHDRIYNTLIHGFLTSGQLKEAFRLLKLMTSQGVMPSVVTYNSLMTYLCKNGRFKEAVELFYSMAVKGQKPSVVSYSIILHGYAIEGSLVKMIDLCELMARDGVVPNLHCFNILINAYAKYGMMDVAMLFFEDMLKQGVKPNEFTYLTVISAFCKMGRMDDAMEKFSEMINMGVPLDTEVYMCMVEGYLNLGNSMKAKEFITKMKNRDIHHRPRKGN

SEQ ID NO: 867 - protein, 477 aa, Triticum aestivum; identical to SEQ ID NO: 866

SEQ ID NO: 868 - protein, 477 aa, Triticum aestivum; identical to SEQ ID NO: 866

SEQ ID NO: 869 - protein, 477 aa, Triticum aestivum; identical to SEQ ID NO: 866

SEQ ID NO: 870 - protein, 477 aa, Triticum aestivum; identical to SEQ ID NO: 866

SEQ ID NO: 871 - protein, 477 aa, Triticum aestivum; identical to SEQ ID NO: 866

SEQ ID NO: 872 - protein, 404 aa, Triticum aestivum
MARAGRHWMTAPTIHTYNILIDCCHRACRPDLGPAFFSRLLKTGITMSVITYSSLFKCLCDMKRTEEALGVLLHRMPDDLPDVISYSVILKSFCDSGRSQLALDLLRMMAEKGSDHSPSVVSYSVVIDGFFKEGEISKACDLFHEMMQQGVVPDVVMYTSIINALCKARAMDKAEVVLRSMVHNGAQPDAVTYNSLIQGYSTLGQLKDVVRLLKVMRSQGVMPSVVTYTSLMDCLCKHGRIKEAEEIFYSMAVNGQKPDIVSYSIMLRGYAIEGSLVDMIDLCELMARNGVVPDLQFFNIVINAYAKHGMMDVALLFFEDMLKQGVKPNEFTYLTVISAFCKMGRMDDAVEKFREMIDMGVPVDTEVYMCMVEGYFKNGDSVKAKDFITKMKNKDIPNRPQKGN

SEQ ID NO: 873 - protein, 456 aa, Triticum aestivum
MCKVQAMDEAEEVLQQMFDTGILPNITTYNSLIHGYYSSGQCEQVAHIFKKMSRNGVQPDIATYTIQMDYLCKSRRFAGARTIFDSMAGKDQKPNVTSYSILLHAYAMEQSVHDMHCLIELMVENGIAPNHSVYNILIVAYAKGKMFDEVMHIFTKMRQQGLNPNAASYGTVINLLCSIGRMDDAMLQFNQMITEELAPDIIVFNTLISGFCSCGKWEKVHELLAEMLNRGIYPDNVFFNTIMDHLCKNGRVMESQDLADLMIHMGLKPDMHTYNTLMGGYFFIGKMDEVRKLLDHMVSIGMEPDVVTYNTLIDGYFKNGMIDDALAIFSEMLDKKVKPCVITYNTVLHGLFHTGRTVAANELYLRMIDSGICVDIVTYNIILSGLCRNNCVDEALRMFQNLCSTNYQLEIRTYNIMISALLKVGRKEEATGLLDGISAKGFVLDAVTYRLMIQSF

SEQ ID NO: 874 - protein, 275 aa, Triticum aestivum
MDDAMLQFNQMITEELAPDIIVFNTLISGFCSCGKWEKVHELLAEMLNRGIYPDNVFFNTIMDHLCKNGRVMESQDLADLMIHMGLKPDVHTYNTLMGGYFFIGKMDEVRKLLDHMVSIGMELDVVTYNTLIDGYFKNGMIDDALAVFSEMLDKKVKPCAITYNTVLHGLFHTGRTVAANELYLRMIDSGICVDIVTYNIILSGLCRNNCVDEALRMFQNLCSTNYQLETRTYNIMISALLKVGRKEEATGLLDGISAKGFVPDAVTYRLMIQSF

SEQ ID NO: 875 - protein, 275 aa, Triticum aestivum; identical to SEQ ID NO: 874

SEQ ID NO: 876 - protein, 305 aa, Triticum aestivum
MFDTGILPNITTYNSLIHGYYSSGQCEEVAHIFKKMSRNGVQPDIATYTIQMDYLSKSRRFAEARTIFDSMAGKDQKPNVTSYSILLHAYAMEQSVHDMHCLIELMVENGIAPNHSVYNILIVAYAKGKMFDEVMHIFTKMRQQGLNPNAASYGTVINLLCSIGRMDDAMLQFNQMITEELAPDIIVFNTLISGFCSCGKWEKVHELLAEMLNRGIYPDNVFFNTIMDHLCKNGRVMESQDLADLMIHMGLKPDMHTYNTLMGGYFFIGKMDEVRKLLDHMVSIGMEPDVVTYNTLIDGYFKNGM

SEQ ID NO: 877 - protein, 275 aa, Triticum aestivum; identical to SEQ ID NO: 874

SEQ ID NO: 878 - protein, 456 aa, Triticum aestivum; identical to SEQ ID NO: 873

SEQ ID NO: 879 - protein, 275 aa, Triticum aestivum; identical to SEQ ID NO: 874

SEQ ID NO: 880 - protein, 230 aa, Triticum aestivum
MLNRGIYPDNVFFNTIMDHLCKNGRVMESQDLADLMIHMGLKPDMHTYNTLMGGYFFIGKMDEVRKLLDHMVSIGMEPDVVTYNTLIDGYFKNGMIDDALAIFSEMLDKKVKPCVITYNTVLHGLFHTGRTVAANELYLRMIDSGICVDIVTYNIILSGLCRNNCVDEALRMFQNLCSTNYQLEIRTYNIMISALLKVGRKEEATGLLDGISAKGFVLDAVTYRLMIQSF

SEQ ID NO: 881 - protein, 456 aa, Triticum aestivum; identical to SEQ ID NO: 873

SEQ ID NO: 882 - protein, 456 aa, Triticum aestivum; identical to SEQ ID NO: 873

SEQ ID NO: 883 - protein, 275 aa, Triticum aestivum; identical to SEQ ID NO: 874

SEQ ID NO: 884 - protein, 456 aa, Triticum aestivum; identical to SEQ ID NO: 873

SEQ ID NO: 885 - protein, 204 aa, Triticum aestivum
MCKVQAMDKAEEVLQQMFDTGILPNITTYNSLIHGYYSSGQCEEVAHIFKKMSRNGVQPDIATYTIQMDYLSKSRRFAEARTIFDSMAGKDQKPNVTSYSILLHAYAMEQSVHDMHCLIELMVENGIAPNHSVYNILIVAYAKGKMFDEVMHIFTKMRQQGLNPNAASYGTVINLLCSIGRMDDAMLQFNQMITEELAPDSASF

SEQ ID NO: 886 - protein, 275 aa, Triticum aestivum; identical to SEQ ID NO: 874

SEQ ID NO: 887 - protein, 359 aa, Triticum aestivum
MPTARLSSLSTSSFKAPSRERRAPLAALAAATERVREGTLSRQDAHHLFDELLGQAAAVPERGLNNFLAALARAPPSSACSDGPGLAIALFNRMSQGAGARVVSPTLCTYSILMDCCCRAGRPDLVVAFFGRLIRLGLRLEVISFSNLLKGLCKAKRSNEALDLLLHRMPELDCAPDVFSYSIVINGCFKEGEVDKACNLFHEMIQLGVQPNVAIYTSIIDALSKCGAMDKAEVVLRQMVDQGIGPNIRTYTSLIHGYSASGQWKEAVRLFKKMIRLGALPDTVMWNSFMDSLCKHRRTKDARDIFDSMAAKGQKPDIFSYSTMLNGYAKEGCFDDMTCLFNSMLQNGILPDHRVFNID

SEQ ID NO: 888 - protein, 359 aa, Triticum aestivum; identical to SEQ ID NO: 887

SEQ ID NO: 889 - protein, 359 aa, Triticum aestivum; identical to SEQ ID NO: 887

SEQ ID NO: 890 - protein, 359 aa, Triticum aestivum; identical to SEQ ID NO: 887

SEQ ID NO: 891 - protein, 359 aa, Triticum aestivum; identical to SEQ ID NO: 887

SEQ ID NO: 892 - protein, 359 aa, Triticum aestivum; identical to SEQ ID NO: 887

SEQ ID NO: 893 - protein, 447 aa, Triticum aestivum
MLRQPVTVSVRALNGLFAALARAPPSTICTDALALAIDLFNRMAQAGRRQVPAPTIITYNILIGCCHRACRPDLGPAFFGRLLKAGIKTDVITYSSLFKCLCDMKRTEEALNMLFHKMPEDLPNVISYSVILKSFCDNGRSQLALDLLQMMAKKGADHSPDVMSYNMVIDGFFKEGEVSKACDLFQEMIRQGIVPTEVTYSSIINALCKARAMDKAEVVLRSMVHNGAQPDAVTYNSLIQGYSTLGQLKEVARLLKVTRSQGVMPSVVTYNSLMDYLCKHGRIKEAEEIFYSMAVNGRRPDIVSYSIMLHGYAIEGSLVKMIDLCELMARDGVVPDLRCFNILINAYAKYGRMDVAMLFFEDMLKQGVKPNEFTYLTVISAFCKMGRMDDAMEKFSEMIDIGVPLDTEVYMCMVEGYFNHGDSMKAEEFITRMKNRDINHKPWEGNR

SEQ ID NO: 894 - protein, 241 aa, Triticum aestivum
MDRLCKNGRVTEAQDLFDLMVHMGVKPDVCTYNTLMGGYLFVGKMDEVSKLLDNMVSIGMEPDVITYSILIDGYSKNGRIDDALVVFREMLDTKGKPSVISFNIMIGALLKCGRKEEAKDLFDGIWANGLVPDVITYSLMIQKLIEEGSLQESDDLFLSTEKNGCAADSRRLNAIVRSLLQKGEIPRAGTYLSKIDERGFTLEASTASLLTALASGGKGQEYKELLPEKYHSFLEQGTLNF

SEQ ID NO: 895 - protein, 241 aa, Triticum aestivum; identical to SEQ ID NO: 894

SEQ ID NO: 896 - protein, 454 aa, Triticum aestivum
MEQAHPPNSALVISYPRLRRSGLVGGERWRRIITYNIQMDYLCKSGQCAEARKIFDSMISLGQNPTATTYSILLHGYAMEKSFHDMHCLIDLMVENGISPDHYVYNILISAYAKEEMVGEVMHIFTKMRQQGLNPDAVSYGTVIDLLSRIGRMDDAMSLFNQMITEGLAPGTIVFNHLISGFCTCGKWEKVHELFSEMLDRGICPDTVFFNTVMDRLCKNGRVTEAQDLFDLMVHMGVKPDVCTYNTLMGGYLFVGKMDEVSKLLDNMVSIGMEPDVITYSILIDGYSKNGRIDDALVVFREMLDTKGKPSVISFNIMIGALLKCGRKEEAKDLFDGIWANGLVPDVITYSLMIQKLIEEGSLQESDDLFLSTEKNGCAADSRRLNAIVRSLLQKGEIPRAGTYLSKIDERGFTLEASTASLLTALASGGKGQEYKELLPEKYHSFLEQGTLNF

SEQ ID NO: 897 - protein, 241 aa, Triticum aestivum; identical to SEQ ID NO: 894

SEQ ID NO: 898 - protein, 457 aa, Triticum aestivum
MSNIGMPIFGSKPIMLHVPHAPPQLLHHAHVPHRPPPPPPLLLLLLLLLHLHLATLTVTVMVSPRRLCRGHGARPRRDAQPGGRTPPVRPIATAGHSGPRALPGRLPCRPRPCARLSCLQRWPRPRHRPLQPRMPRRSRPAGGAAHSLHLRHPDELLLPRASSGPRACLIWPPPKDRPQNKLDRRQHRPQVPCCAKRTDEAVNVLIHRMSDLGCVPNEFSYNTVLKSLCEDSRSQRALDLLRVMAKGDGCSPCVVSYSTVIYGFFKEGKVGKACNLFHEMTQQGVVSDVVTYNSIIDALCKARAMDKAELFLRQMVDDDIRPNGVTYTAMIHGYSTLGQWKKATQMFREMTSRGLVPDTVTWNSFMASLCKHGRSREAAELLYSMAAKGHKPNVVSYSTLLHGYANEGCFADMVNLFNSMVGKGIVPDHHVFNIFINAYAKCGMMDEVMHMLTEMQE

SEQ ID NO: 899 - protein, 430 aa, Triticum aestivum
MSRNGVQPDIVTYNIQMDYLCKNGGCAEARKFFDSMISLGQKPTVTTYNILLHGYAMERSFHDMNCLIDLMVGNGIAPDHNVYNILISAYAKEETVGEVMHIFTKMRQQGLNPNAASYGTVINLLCRIGRMDDAVLQFTQMITEGLTPDIIVFTPLISGFCACGKLEKVHELFSEMLDRGIYPDTMFFTTVMDRLCKNGRVMEARDIFDLMVHMGVKPDVRSYATLMHGYFLVGKMDEVRKLLDNMCSIGMEPDVVTYSILIDGYSKNGRIDDAFVVFKEMLEGKVKPCVITFTIMIGALLKCGRKEEAKDLFDGIWANGLVPNVITYSLMIQNLIEEGSLQESDDLFLSMEKNGCAADSRMLNAIVRRLLQRGEMPRAGTYLSKIDEGSFTLEASTAGLLTALASGGKCQEYKGLLPEKYHSFLEQGTD

SEQ ID NO: 900 - protein, 430 aa, Triticum aestivum; identical to SEQ ID NO: 899

SEQ ID NO: 901 - protein, 430 aa, Triticum aestivum; identical to SEQ ID NO: 899

SEQ ID NO: 902 - protein, 442 aa, Triticum aestivum
MSGHFVPVDRRILEQNIKARYHAGDIGTEDALHLFDELLQCAGSSSIRAINYLVTTVGRDSPALGVSLFNRVASANVAPNSMTYTILVDCCCRAGRLDLGFAAMGHIIKMGFAADAIVTFSHLLKAICAEKKTSYAMDIVLRIMPMFNCVPDNFSYNILFKGLCNERRSQEALELIHMMVQHGGSCQPNVVSYNTVVDGLLKEGEVGKAYTLFSEMLRQGISPDVVTCTSIISGMCKVHAMDKAEEVLQQMLDRRILPDAATYNCLIHGYYLLGQCEEVDRIFKEMSRNGVQPNIVTYNIQMDYLCKSGRCAEARKIFDSMIGLGQKPVVTTYSILLHGYAMEKSFHDMHCLIDLMVENGIAPNHPVYNILISACAQEEMVSEVMHIFTKMRQQGLNPNVANYGVVVNLLSRIGRMDDAMSLFNQMITEGLAPDIIVFTPPY

SEQ ID NO: 903 - protein, 442 aa, Triticum aestivum; identical to SEQ ID NO: 902

SEQ ID NO: 904 - protein, 442 aa, Triticum aestivum; identical to SEQ ID NO: 902

SEQ ID NO: 905 - protein, 442 aa, Triticum aestivum; identical to SEQ ID NO: 902

SEQ ID NO: 906 - protein, 442 aa, Triticum aestivum; identical to SEQ ID NO: 902

SEQ ID NO: 907 - protein, 442 aa, Triticum aestivum; identical to SEQ ID NO: 902

SEQ ID NO: 908 - protein, 435 aa, Triticum aestivum
MSRLRLLRRSSSSTTLIPLLRLLRRCSTSTSTSPPSRSWSPRDAFVAAIERVRARTLSPEDAHHLFDDLLGQATPVPVRTLNGFFAVLARATSSAACIRDGPALAVALFNRVCQEEAGPRVATPTVHTYGILMDCCCRARRPDLGLALFGRFLGTGLRTNEIVATTFLKCLCCAKRTEEVVKVLLHRMPELGCVPNAISYSIVLKSLCENSMSQQALDLLQMVGKEGGCLRDVVAYNTIIHGFFKECGIDKACHLFHEMMRQGVVPTVVTYNTVIDALCKAGEMDKAELVFQRMARNGAQPNKVTCNGSKFSSLTDGYCSVGKMDKTFKLLDAMVSDGIEPDAVTYSALLDGYFKNGRIDDGLTLFREMSCKGVKPTTVTYGIILDGLYRAGRTAAAKKMFDQMIKSGITVTVSIYTTPSFPVYKAYFNFFVFPI

SEQ ID NO: 909 - protein, 435 aa, Triticum aestivum
MSRLRLLRRSSSSTTLIPLLRLLRRCSTSTSTSPPSRSWSPRDAFVAAIERVRARTLSPEDAHHLFDDLLGQATPVPVRTLNGFFAVLARATSSAACIRDGPALAVALFNRVCQEEAGPRVATPTVHTYGILMDCCCRARRPDLGLALFGRFLGTGLRTNEIVATTFLKCLCCAKRTEEVVKVLLHRMPELGCVPNAISYSIVLKSLCENSMSQQALDLLQMVGKEGGCLRDVVAYNTIIHGFFKECGIDKACHLFHEMMRQGVVPTVVTYNTVIDVLCKAGEMDKAELVFQRMARNGAQPNKVTCNGSKFSSLTDGYCSVGKMDKTFKLLDAMVSAGIEPDAVTYSALLDGYFKNGRIDDGLTLFREMPCKGVKPTTVTYGIILDGLYRAGRTAAAKKMFDQMIKSGITVTVSIYTTPSFPVYKAYFNFFVFPI

SEQ ID NO: 910 - protein, 436 aa, Triticum aestivum
MVDLYNSMSSNGIVPNRQVFNILIDAYAKRGMTDEAMLIFTEMRGQGLSPDVCTYSTLISALSRTGRLADAMDRFSQMISIGIQPDAVVYQALIQGYCTVGDLVKAKVLVSEMMNRGIPPPDIVFFNSIMTSLCKEGRVTDAHSILDFVIHFGVRPSISTFNLLIDGYCLVGKMKKAFGVLDTMASVGIEPDDISYSAIINGCFKNGRIDDGFTIFREMLKKVKPTTVTYNIILGGLFCAGKTVAAMKMFHEMIESGITVSSSTYRTVLGGLCRNSCEDEAITLFQKLGAMNVKLDIAILNTMINAMFKLQRREEANDLFSAVSASGLVPNASTYGVMIKNLLREGSVEKAENMFSLMEKSGCAPDSRLINDIIRILLKKGEIVKAGNYMSKVDGRSISLEASTTSLMIRLFSSEGKYRGQINLLPVKYQFFDGVS

SEQ ID NO: 911 - protein, 365 aa, Triticum aestivum
MDRFSQMISIGIQPDAVVYQALIQGYCTVGDLVKAKVLVSEMMNRGIPPPDIVFFNSIMTSLCKEGRVTDTHSILDFVIHFGVRPSISTFNLLIDGYCLVGKMKKAFGVLDTMASVGIEPDDISYSAIINGCFKNGRIDDGFTIFREMLKKVKPTTVTYNIILGGLFCAGKTVAAMKMFHEMIESGITVSSSTYRTVLGGLCRNSCEDEAITLFQKLGAMNVKLDIAILNTMINAMFKLQRREEANDLFSAVSASGLVPNASTYGVMIKNLLREGSVEKAENMFSLMEKSGCAPDSRLINDIIRILLKKGEIVKAGNYMSKVDGRSISLEASTTSLMIRLFSSEGKYRGQINLLPVKYQFFDGVS

SEQ ID NO: 912 - protein, 365 aa, Triticum aestivum; identical to SEQ ID NO: 911

SEQ ID NO: 913 - protein, 365 aa, Triticum aestivum; identical to SEQ ID NO: 911

SEQ ID NO: 914 - protein, 365 aa, Triticum aestivum; identical to SEQ ID NO: 911

SEQ ID NO: 915 - protein, 436 aa, Triticum aestivum; identical to SEQ ID NO: 910

SEQ ID NO: 916 - protein, 444 aa, Triticum aestivum
MARALPSPSSTACPEALVHGWCRCRAGRPDLVVAFFGRLLRLGLCLNVISLSNLLKGLCQVKRTNEAVDLLLHRTPELDCVPNVFSYSIVINGCFKQGEVDKACNLFHGMIQLGVQPNVVIYTSIIDALSKCGAMDKAEVVFRQMVDKGIGPDVMTCTSLIHGYSISGRWKAAVRVFKEMISLGVVPDTVMWNSFVDSLCKHRRTKEARVIFDSMAAKGQKPDTVSYSIMLNGYVKEGCFDDMTGLFNSMLQNGVVPNHHIFNILINAYAKRGLMDEAMHMFEVMRQQGVNPDVVDYLVVMDSLCKMGRMDAALDKFNQMVNQGVSPNKAVYQCLVLGSCSHGDFVKAKELISEALNRGLCSNSVFFYPVINDLCKEGKVKEAQDMFDFIVGIGQRPDVIMYNSLMDGYCLVGKVEEALRVLDAMKSAGLQPDAIMYGILLNDH

SEQ ID NO: 917 - protein, 444 aa, Triticum aestivum; identical to SEQ ID NO: 916

SEQ ID NO: 918 - protein, 444 aa, Triticum aestivum; identical to SEQ ID NO: 916

SEQ ID NO: 919 - protein, 439 aa, Triticum aestivum
MMSLFNSMEGDGIVANSYVFNILINAYAKGGMMDEAMLILTEMRGQGLSPDVFTYSTLVSAFCRMGRLADAMDKFSQMIGTGVQPNTVVYHSLVQGLCTHGDLVKAKELISEMMNKGMIRPNIAFFNSIMDSLCNEGRVVDAHHIFDLVTDIGEKPDVITFSTLIDGYCLVGEMEKACRVFDAMVSAGIEPDVITYSTLVSGYCKSGRIDDGLILFREMLHKEVKPTTVTYGTVLDGLFRAWRSAAAKKVFHEMIESGIMVSISIYNIILGGLCRNNCADEAIVLFQKLCAMNVKFNITTLNIMLNAFYKVQRRDEASDLFAALPASGLVPNASTYGVMIQNLLKEGAVEEADSMFSSMEKSGCAPSSRFSNCIIRTLLEQGEIVKAGKYMSKVDGKTFLLEASTTSLLMSLFSRGGKYQEHILLLPAKYQFFSGVNHS

SEQ ID NO: 920 - protein, 439 aa, Triticum aestivum
MMSLFNSMEGDGIVANSYVFNILINAYAKGGMMDEAMLILTEMQGQGLSPDVFTYSTLVSAFCRMGRLADAMDKFSQMIGTGVQPNTVVYHSLVQGLCTHGDLVKAKELISEMMNKGMIRPNIAFFNSIMDSLCNEGRVVDAHHIFDLVTDIGEKPDVITFSTLIDGYCLVGEMEKACGVFDAVVSAGIEPDVITYSTLVSGYCKSGRIDDGLILFREMLHKEVKPTTVTYGTVLDGLFRAWRSAAAKKVFHEMIESGIMVSISIYNIILGGLCRNNCADEAIVLFQKLCAMNVKFNITTLNIMLNAFYKVQRRDEASDLLAALPASGLVPNASTYGVMIQNLLKEGAVEEADSMFSSMEKSGCAPSSRFSNCIIRTLLEQGEIVKAGKYMSKVDGKTILLEASTTSLLMSLFSRGGKYQEHILLLPAKYQFFSGVNHS

SEQ ID NO: 921 - protein, 439 aa, Triticum aestivum; identical to SEQ ID NO: 919

SEQ ID NO: 922 - protein, 439 aa, Triticum aestivum; identical to SEQ ID NO: 920

SEQ ID NO: 923 - protein, 384 aa, Triticum aestivum
  misc_feature (354)..(354): Xaa can be any naturally occurring amino acid
  misc_feature (371)..(371): Xaa can be any naturally occurring amino acid
  misc_feature (373)..(373): Xaa can be any naturally occurring amino acid
MMSLFNSMEGDGIVANSYVFNILINAYAKGGMMDEAMLILTEMRGQGLSPDVFTYSTLVSAFCRMGRLADAMDKFSQMIGTGVQPNTVVYHSLVQGLCTHGDLVKAKELISEMMNKGMIRPNIAFFNSIMDSLCNEGRVVDAHHIFDLVTDIGEKPDVITFSTLIDGYCLVGEMEKACRVFDAMVSAGIEPDVITYSTLVSGYCKSGRIDDGLILFREMLHKEVKPTTVTYGTVLDGLFRAWRSAAAKKVFHEMIESGIMVSISIYNIILGGLCRNNCADEAIVLFQKLCAMNVKFNITTLNIMLNAFYKVQRRDEASDLFAALPASGLVPNASTYGVMIQNLLKEGAVEEADXMFSSMEKSGCAPSSRLXNXVSSELYWKRGR

SEQ ID NO: 924 - protein, 439 aa, Triticum aestivum; identical to SEQ ID NO: 919

SEQ ID NO: 925 - protein, 439 aa, Triticum aestivum; identical to SEQ ID NO: 920

SEQ ID NO: 926 - protein, 360 aa, Triticum aestivum
MDCCCRADRPDLVVAFFGRLLRLGLRLNVISFNNLLKGLCQAKRSNEALDLLLHRMPELDCAPDVFSFNIVINGCFREGEVDKACNLFHEMPQLGVQPDVVTYNSIIIALSRAGAMGKAEVVLRQMVDKGIGPDVMTYNSLIHGYSTLGQWKAAVRVFKEMVSVGVLPNAVTLNSFMDSLCKHRRTKEARDIFDSMAAKGHKPNIASYSTMLNGYAKQGCFDDMTGLFNSMVQNGVVPNHHIFNILINAYAKRGLMDEAMHMFEVMRQQGVNPDVFSHQIVMDSLCKMGRMDAALDKFNQMVNQGVSPNKAVYQCLVLGSCSHGHFVKAKELISEAVNRGLCSNSVFFYPVVNDLCKEGR

SEQ ID NO: 927 - protein, 430 aa, Triticum aestivum
MSRNGVQPDIVTYSIQMDYLCKSGRCTEARKIFDSMISLGQKPTVTTYNILLHGYAMERSFYDMNCLIELMDDNGISPDHYGYNILISAYAKEETVGEVMHIFTKMRQQGLNPNVVNYGAVINLLSSIGRMDDAMSQFNQMITEGLAPDIIVFTPLISGFCSCGKWEKVHELFSEMLDRGIYPNTVFFTTVMDRLCKNGRAMEARDIFDLMVHMGVKPDVRSYATLMHGYFLVGKMDEVRKLLDNMCSIGMEPDVVTYSILIDGYSKNGRIDDAFVVFKELLEGKVKPCVITFNIMIGALLKCGGKAEAKDLFDGIWANGLVPDVITYSLMIQKLIEEGSLQESDDLFLSMEKNGCAADSRMLNAIVRRLLQRGEMPRAGTYLSKIDEGSFTLEASTAGLLTALASGGKCQEYKGLLPEKYHSFLEQGTG

SEQ ID NO: 928 - protein, 221 aa, Triticum aestivum
MLRKGLKPTTFNYNVILDGLFLAGRTVAAKEKFDEMVESGVSVCIDTYSIVLGGLCRNNCSGEAITLFQKLSTMDVKFNIIIVNIMIDAFYRVQRNQEAKDLFAAVSANGLVANVFTYTIMMKNLIKEGSVEEADDLFLSMEKSGCTADSYMLNLIVRMLLEKGELVKAGNYMSKVDAKSYSLEAETVSLLISLFSGKGKYREHIGLLPTKYRFREEAATV

SEQ ID NO: 929 - protein, 432 aa, Triticum aestivum
MAIKGLKPDNVSYAIRLHGYATEGCFVDMINLFNSMERDCILPDCRIFSILIYAYAKSGKLDKAMLIFNEMQKQGVSPNAVTYSTVIDAFCKKGRLDDAVIKFNQMIDTGVRPDTAVYSSLIQGFCTRGDLVKAKELLTKMMNKGIPPSDIKFFSSIMQNLCTEGRVTEARDVLGLIAHIGMRPNVCTFNILIGGYCLVGKMEDASKIFDDMMSYGLEPSNITYGILINGYCKNLRIDDGLILFKEMLRKGLKPTTFNYNVILDGLFLAGRTVSAKEKFDEMVESGVSVCIDTYSIVLGGLCRNNCSGEAITLFQKLSTMDVKFNITIVNIMIDAFYRVQRNQEAKDLFAAVSANGLVANVFTYTIMMKNLIKEGSVEEADDLFLSMEKSGCTADSYMLNLIVRMLLEKGELVKAGNYMSKVDAKSYSLEAT

SEQ ID NO: 930 - protein, 432 aa, Triticum aestivum; identical to SEQ ID NO: 929

SEQ ID NO: 931 - protein, 221 aa, Triticum aestivum
MLHKGLKPTTFNYNVILDGLFLAGRTVAAKEKFDEMVESGVSVCIDTYSIVLGGLCRNNCSGEAITLFQKLSTMDVKFNIIIVNIMIDAFYRVQRNQEAKDLFAAVSANGLVANVFTYTIMMKNLIKEGSVEEADDPFLSMEKSGCTADSYMLNLIVRMLLEKGELVKAGNYMSKVDAKSYSLEAETVSLLISLFSGKGKYREHIGLLPTKYRFREEAATV

SEQ ID NO: 932 - protein, 221 aa, Triticum aestivum; identical to SEQ ID NO: 928

SEQ ID NO: 933 - protein, 432 aa, Triticum aestivum; identical to SEQ ID NO: 929

SEQ ID NO: 934 - protein, 432 aa, Triticum aestivum; identical to SEQ ID NO: 929

SEQ ID NO: 935 - protein, 221 aa, Triticum aestivum; identical to SEQ ID NO: 928

SEQ ID NO: 936 - protein, 221 aa, Triticum aestivum; identical to SEQ ID NO: 928

SEQ ID NO: 937 - protein, 221 aa, Triticum aestivum; identical to SEQ ID NO: 928

SEQ ID NO: 938 - protein, 439 aa, Triticum aestivum
MPTARLSSISTSSFRAPSRKPRAPLAALAAATERVRAGTLSREDAHHLFDELQGQAAAVPERGLNNFLAALARAPPSSACSDGPGLAFALFNRMSRGAGARVVSPTLCTYSILMDCCCRAGRPDLVVAFFGRLLRLGLRLNVISFNNLLKGLCQAKRSNEALDMLLHRMPEQDCAPDVFSFNIVINGCFREGEVDKACNLFHEMPQLGVQPDVVTYNSIIIALSRAGAMGKAEVVLRQMVDKGIGPDVMTYNSLIHGYSTLGQWKAAVRVFKEMVSVGVLPNAVTLNSFMDSLCKHRRTKEARDIFDSMAAKGHKPNIASYSTMLNGYAKQGCFDDMTGLFNSMLQNGVVPNHHIFNILINAYAKRGLMDEAMHMFEVMRQQGVNPDVFSYQIVMDSLCKWVGWMLLWTNLIRWSIKEFHLTKLFTNAWFWVLVLMVIL

SEQ ID NO: 939 - protein, 431 aa, Triticum aestivum
  misc_feature (390)..(390): Xaa can be any naturally occurring amino acid
MPTARLSSISTSSFRAPSRKPRAPLAALAAATERVRAGTLSREDAHHLFDELQGQAAAVPERGLNNFLAALARAPPSSACSDGPGLAFALFNRMSRGAGARVVSPTLCTYSILMDCCCRAGRPDLVVAFFGRLLRLGLRLNVISFNNLLKGLCQAKRSNEALDMLLHRMPELDCAPDVFSFNIVINGCFREGEVDKACNLFHEMPQLGVQPDVVTYNSIIIALSRAGAMGKAEVVLRQMVDKGIGPDVMTYNSLIHGYSTLGQWKAAVRVFKEMVSVGVLPNAVTLNSFMDSLCKHRRTKEARDIFDSMAAKGHKPNIASYSTMLNGYAKQGCFDDMTGLFNSMLQNGVVPNHHIFNILINAYAKRGLMDEAMHMFEVMKQQGVNPDVVXYLVVMDSLCKMGKMAAAMDKFNQMINQGVSPNKAVYQCLGK

SEQ ID NO: 940 - protein, 412 aa, Triticum aestivum
MSRRMVRRVLERNIEERYRAGHIGTEDALHLFDELLQVAGPSSTRAINCLLYVVGRDCPALGVSLFNRVARAKVPPHNVTYSILIGCCCHAGRLDLGFAAMGNIIKLGFAAEAMFSFSHLLRAVCAENKTSYAMDIALRRMPEFNCTPNVFSYSILLKGLCVEKRSQEALELIHMMVDAGGSCQPNVVSYSTVVDGLLKEGEVNKAYSLLCEMLHQGISPNVVTYSSIIFSMCKVQAMDKAEEVLQQMFDTGILPNITTYNSLIHGYYSSGQCEEVVRIFKKMSRNGVQPDIATYNIQMDYLCKSRRFAEARTIFDSMAGKDQKPNVTSCSILLHAYAMEQSFHDMHCLIELMVENGIAPDHSVYNILIVVYAKGKMVDEVMHIFTKMRQQGLNPNAANYGTVINLQYWPNG

SEQ ID NO: 941 - protein, 412 aa, Triticum aestivum; identical to SEQ ID NO: 940

SEQ ID NO: 942 - protein, 412 aa, Triticum aestivum; identical to SEQ ID NO: 940

SEQ ID NO: 943 - protein, 412 aa, Triticum aestivum; identical to SEQ ID NO: 940

SEQ ID NO: 944 - protein, 412 aa, Triticum aestivum; identical to SEQ ID NO: 940

SEQ ID NO: 945 - protein, 412 aa, Triticum aestivum; identical to SEQ ID NO: 940

SEQ ID NO: 946 - protein, 425 aa, Triticum aestivum
MSNLRLLRRSSSSMSTTTSPPSRSWSPHSAFAAATERVRAGTLSQDDAHHLFDELLRQATPVHERSLNGFLAALARATSSAACIRDGPALAIALFNRVCREQAGPRVAPLTVHTYGILMECCCRAGHPELGLAIFSRLLRTGLKTNEIVGSTFLKCLSYTKRTDEALNVLLHRMPELGCVPNAFSYSIVLKSLCDNSMSQRALDLLQRMAKEGGGCFLNVVTYSTVIHGFFKEGEIGKACSLFHEMMQQGIEPDVWTYNSIIDALCKARAMDKAELVLRQMVAKGAQPDTVTYNCMINGYATSGRLKEAAKMFREMKSRGVTPNIVTCGSLMTSLCKHGRSKEARQIFDSMTAKGHRANVVSYSILLHGYANEGCFADMIDLFNSMKSNGIAADCHVFNILINGYAKRGMMDEAVLILLKCGKKE

SEQ ID NO: 947 - protein, 425 aa, Triticum aestivum; identical to SEQ ID NO: 946

SEQ ID NO: 948 - protein, 425 aa, Triticum aestivum; identical to SEQ ID NO: 946

SEQ ID NO: 949 - protein, 425 aa, Triticum aestivum; identical to SEQ ID NO: 946

SEQ ID NO: 950 - protein, 425 aa, Triticum aestivum; identical to SEQ ID NO: 946

SEQ ID NO: 951 - protein, 425 aa, Triticum aestivum; identical to SEQ ID NO: 946

SEQ ID NO: 952 - protein, 429 aa, Triticum aestivum
MEHASKIFDDMMSHGLEPSNITYGILINGYCKNRRIDDGLILFKEMLHKGLKPTTFNYSLDIAMDKFNQMVDMGVRPNAIVYHSLIQGFCTHGDLVKAKELVAEMRNKAMRPPDIKFFHSIMQNLCTEGRVIEARDILDLIVRIGMRPDVPIFNLLIGGYCLVRKMADASKIFDDMVSYGLEPSNITYGILINGYCKNRRIDEGLILFKEMLCKGLKPTTFNYNVILDGLFLAGRTVAAKEKFDEMVESGVSVCIGTYSIVLGGLCRNNCSGEAITLFQKLSTMDVKFNIIIVIDAFYKVQRNQEAKDLFAAVSANGLVANVFTYTIMMKNLIKEGSVEEADDLFLSMEKSSCTADSYMLNLIVRMLLGKGEIVKAGNYISKIDAKSYSLEAKTVSLLISLFSGKGKYREHIGLLPAKYRFREEAATVV

SEQ ID NO: 953 - protein, 363 aa, Triticum aestivum
MSRLRPRRSSTTPMFHLLRRSSSSTSTSTPTLRPSRSWSPHAAFAAATERVRAGTLSPEDAHHLFDELLRQATPVPSRSLDGFIAALARAPASAACIRDGPALALGLFNRVCRDEAGARVAPRTIFTYGILMNCCCCAHRPDLGLALFGRFLRTGMKANEIIATTFLKCLCSAKRTDEAVNLLLHRIPELGCVRNAFSYSIVLKSFCENSMSQRGLDLLQMMAKEGGACSPNVVAYSTVIHGFFKEGETGKACNLFHEMMQQGVVPTVATYNSIIDALCKARAMDKAEIVLRQMVDNGAQPDNWTYNCMIHGYSTSGQLREATKMLRKMTTRGLIPDIVTCSSLMASLCKHGRSKEASDFFVP

SEQ ID NO: 954 - protein, 363 aa, Triticum aestivum
MSRLRPRRSSTTPMFHLLRRSSSSTSTSTPTLRPSRSWSPHAAFAAATERVRARTLSPEDAHHLFDELLRQATPVPSRSLDGFIAALARAPASAACIRDGPALALGLFNRVCRDEAGARVAPPTIFTYGILMNCCCCAHRPDLGLALFGRFLRTGMKANEIIATTFLKCLCSAKRTDEAVNLLLHRIPELGCVRNAFSYSIVLKSFCENSMSQRGLDLLQMMAKEGGACSPNVVAYSTVIHGFFKEGETGKACNLFHEMMQQGVVPTVATYNSIIDALCKARAMDKAEIVLRQMVDNGAQPDNWTYNCMIHGYSTSGQLREATKMLRKMTTRGLIPDIVTCSSLMASLCKHGRSKEASDFFVP

SEQ ID NO: 955 - protein, 363 aa, Triticum aestivum; identical to SEQ ID NO: 953

SEQ ID NO: 956 - protein, 363 aa, Triticum aestivum; identical to SEQ ID NO: 953

SEQ ID NO: 957 - protein, 363 aa, Triticum aestivum; identical to SEQ ID NO: 953

SEQ ID NO: 958 - protein, 363 aa, Triticum aestivum; identical to SEQ ID NO: 954

SEQ ID NO: 959 - protein, 433 aa, Triticum aestivum
MSRLQVRSFSSPVSSRANDLLTELHGHLGFGTLRPELAHQLFDEMLRQPVPVSARALNGLFAALACAPPSAACTDGPVLAIHLFNRMARAGCRRVIALTSHTYSILIECCCRARRPDLGPSFFTHLLKTGVTADIVIYSGLFKCLCDLKCTEEALDMLLHRMPNDVSDAISYSVILKSLCDNGRSQLALDVLHIMTKKGADYSPDVFAYNMVIDGFFKEGEVSKACDLFHEMIQQGVVPDVAMYTSIINALCKARAMDKAEVVLQSMVHNGVQPDVVTYTILIQGYSTLRQLKEVARLLKVMRSQGVMPSVVTYNSLMTCLCKNGRFKEAVEIFYSMAVKGLKPNVISYSIILHGYAKEGSLVAMIDLYQLMAAEGVIPDLHCFNILIAAYAEYGMMDVAMLFFEDMLKQGVNPNEVTNFVCDSWIMQNGQDG

SEQ ID NO: 960 - protein, 433 aa, Triticum aestivum
MSRLQVRSFSSPVSSRANDLLTELHGHLGFGTLRPELAHQLFDEMLRQPVPVSARALNGLFAALACAPPSAACTDGPVLAIHLFNRMARAGCRRVIPLTSHTYSILIECCCRARRPDLGPSFFTHLLKTGVTADIVIYSGLFKCLCDLKCTEEALDMLLHRMPNDVSDAISYSVILKSLCDNGRSQLALDVLHIMTKKGADYSPDVFAYNMVIDGFFKEGEVSKACDLFHEMIQQGVVPDVAMYTSIINALCKARAMDKAEVVLRSMVHNGVQPDVVTYTILIQGYSTLRQLKEVARLLKVMRSQGVMPSVVTYNSLMTCLCKNGRFKEAVEIFYSMAVKGLKPNVISYSIILHGYAKEGSLVAMIDLYQLMAAEGVILDLHCFNILIAAYAEYGMMDVAMLFFEDMLKQGVNPNEVTNFVCDSWIMQNGQDG

SEQ ID NO: 961 - protein, 433 aa, Triticum aestivum; identical to SEQ ID NO: 959

SEQ ID NO: 962 - protein, 433 aa, Triticum aestivum; identical to SEQ ID NO: 959

SEQ ID NO: 963 - protein, 433 aa, Triticum aestivum; identical to SEQ ID NO: 959

SEQ ID NO: 964 - protein, 433 aa, Triticum aestivum; identical to SEQ ID NO: 959

SEQ ID NO: 965 - protein, 401 aa, Triticum aestivum
MARAGRRQATTPTIYTYNILMECCHRACCPDLGLAFFGRLLKTGIPTNIIDYSSLFKCLCDMKRTEEALNVLLHKMPDDLPNVISYSVILKSFCDNGRSQLALDLLQMMAKKGADHSPDVMSYNMVIGGFFKEGEVSKACDLFQEMIRHGIVPTEVTYSSIINALCKARAMDKAEVVLRSMVHNGAQPDAVTYNSLIQGYSTLGQLKEVARLLKVMRSQGVMPSVVTYNSLMTCLCKHGKTKEAEKIFYSMAVNGRKPDVISYSILLHGYAKEGSLIDMIDLCERMPRDGVVPNLHCFNILINAYAKHGMMDVALLFFEDMLKQVVKPNEFTYLTVISAFCKMGRMDDAMEKFREMIDMGVPVDTEVYMCIVEGYFKNGDSVKAKDFITKMIPNRPQKGNY

SEQ ID NO: 966 - protein, 428 aa, Triticum aestivum
MFSPTLFFSSLCNEKRSQEALELIHIMVDHGGSCQPNVVSYNTVVDGLLKEGEAGKAYSLFSEMLRQGISPDVVTCSSIIAGICKVHAMDKAEQVLQQMLDRGILPNVATYTSLIHGYYSLGQCEEVDRVLKEMSRNGVQPNIVTYNIQIDYLCKSGRCAEARKIFDSMISLGQKPTVTTYSILLHGYAIEKSFHHMHCLIDLMVENSIAPDHFVYNILISAYAKEEMVSEVLHIFTKMRQQGLNPNVASYGVIINLLSSIGRMDDAMSKFNQMITEGLAPNIIVFSTVISGFYSCGAWERVHEIFSEMLNRGIYPATVFFNIIMDHLCKEGRVMEAQDIFDLMVHMGVKPVVHNYKTLIHGYWSVSKMDEVSKLLDNVVLIGMEPDVVTYNTLIDGYSKNGRIDDALVVFREMMAGRLSLLLSLLLL

SEQ ID NO: 967 - protein, 413 aa, Triticum aestivum
MSRLRHSSATPISSLRLLRHISSSTSTPTPTSPTSCSWSPHAAFGAATERVRAGTLRPEDAHTLFDELLRQATPVPERSLNGFLAALARAPASGNCIRDGPALAVALFSRVCREEAGPQVAALTVCTYNILMDCCCRARRPELGLALFGRFLRKGLKTDQTGASTFLKCLCYAKRTDEAVDVLLHRMSELGCVPDAISYNTVLKSLCDNGMSQRGLELLQLVAGKGGGCFPDVVAYSTVIHGFFQEGEAGKACSLFHEMMQQGIVPSVVTYSSIIDALCKARAMDRAELVLRQMVANGAQPDTVTYNCMINGYATSGRLKESAKMFREMKSRGLMPDIVTCNSFLSSLCKHGRSKEAAEFFDSMTAKGHKPDIVSYRILLHGYATEGCFADMIDLFNAMERNGIAADCVFSTY

SEQ ID NO: 968 - protein, 413 aa, Triticum aestivum
MSRLRHSSATPISSLRLLRHISSSTSTPTPTSPTSCSWSPHAAFGAATERVRAGTLRPEDAHTLFDELLRQATPVPERSLNGFLAALARAPASGNCIRDGPALAVALFSRVCREEAGPQVVALTVCTYNILMDCCCRARRPELGLALFGRFLRKGLKTDQTGASTFLKCLCYAKRTDEAVDVLLHRMSELGCVPDAISYNTVLKSLCDNGMSQRGLELLQLVAGKGGGCFPDVVAYSTVIHGFFQEGEAGKACSLFHEMMQQGIVPSVVTYSSIIDALCKARAMDRAELVLRQMVANGAQPDTVTYNCMINGYATSGRLKESAKMFREMKSRGLMPDIVTCNSFLSSLCKHGRSKEAAEFFDSMTAKGHKPDIVSYRILLHGYATEGCFADMIDLFNAMERNGIAADCVFSTY

SEQ ID NO: 969 - protein, 413 aa, Triticum aestivum; identical to SEQ ID NO: 968

SEQ ID NO: 970 - protein, 413 aa, Triticum aestivum; identical to SEQ ID NO: 968

SEQ ID NO: 971 - protein, 413 aa, Triticum aestivum; identical to SEQ ID NO: 968

SEQ ID NO: 972 - protein, 413 aa, Triticum aestivum; identical to SEQ ID NO: 968

SEQ ID NO: 973 - protein, 391 aa, Triticum aestivum
MGHVIKLGFAAQAVVNFSHLLKAICAEKKTSYAMDIVLRVIPMFNCVPDVFSYSILFKGLCNERRSQEALELIHIMVQHGGSCQPNVVSYSTVIDGLLKEGEMNKAYSLFCEMLQWGISPNVVTCNSIISGMCKLHAMDKAEEVLQQMLDRGILPNSTTYNGLIHGYYSLGQCEEVGRIFKEMSRNGVQPNIVTYNIQMDYLCKSGRCAEARKIFDSMVSLGQKPDVTTYGILLHGYAMERSFHDIHCLIDLMVGNGLSPNNYIYSILISACAKEKMVDEAMHIFTKMQQQGFNPDVVSYGMVIDLLSSIGRMDDAMSQFNQMITEGLAPDIIVSTPLLVVSVLVANGRRFMNYFLRCWIAASVPTECSSTLIWITFAKVEGLWKPRISST

SEQ ID NO: 974 - protein, 391 aa, Triticum aestivum; identical to SEQ ID NO: 973

SEQ ID NO: 975 - protein, 406 aa, Triticum aestivum
MTDEAMLIFTEMREKGVGPDAFTYSTVIAALSRMGRLTDAMGKLSQMIAMGVQPDTAVYHSLIQGCCIHGDLVKAKELVSEMMNKGIPRPSIAFFSSVINYLCKEGRVMDAHDIFDLVIDMGERPDVITFNSLIDGYCLVDKMDKALRVLDSMVSFGIEPNVVTYNTLVNGYCTNGRIDDGLTLFREMPHKRIKPDTVTYGIILDGLFRSGSTVAARKMFHEMTESGITVSISTYSIILGGFCRNNCADEAITLFQKLGTMNVKFDIAILNTMINAMYKVGRREEAKDLFAAISPSSLVPNESTYAVMIKILLKDGAVEDADNMFSSMDNSGIVPSSRLINDIIRMLLEKGEIAKAGNYLSKVDGKSISLEASTASLMLSLFSRKGKHQEDIKLLPAKYQFFDGFG

SEQ ID NO: 976 - protein, 406 aa, Triticum aestivum
MTDEAMLIFTEMREKGVGPDAFTYSTVIAALSRMGRLTDAMGKLSQMIAMGVQPDTAVYHSLIQGCCIHGDLVKAKELVSEMMNKGIPRPSIAFFSSVINYLCKEGRVMDAHDIFDLVIDMGERPDVITFNSLIDGYCLVDKMDKALRVLDSMVSFGIEPNVVTYNTLVNGYCTNGRIDDGLTLFREMPHKRIKPDTVTYGIILDGLFRSGSTVAARKMFHEMTESGITVSISTYSIILGGLCRNNCADEAITLFQKLGTMNVKFDIAILNTMINAMYKVGRREEAKDLFAAISPSSLVPNESTYAVMIKILLKDRAVEDADNMFSSMDNSGIVPSSRLINDIIRMLLEKGEIAKAGNYLSKVDGKSISLEASTASLMLSLFSRKGKHQEDIKLLPAKYQFFDGFG

SEQ ID NO: 977 - protein, 406 aa, Triticum aestivum; identical to SEQ ID NO: 975

SEQ ID NO: 978 - protein, 406 aa, Triticum aestivum; identical to SEQ ID NO: 975

SEQ ID NO: 979 - protein, 406 aa, Triticum aestivum; identical to SEQ ID NO: 975

SEQ ID NO: 980 - protein, 406 aa, Triticum aestivum; identical to SEQ ID NO: 975

SEQ ID NO: 981 - protein, 411 aa, Triticum aestivum
MPRFSSTTSMSSLRLRLPLRLHARHSSSASQPSHSQGWDPHAAFAAATERARSGSLTPADAHHLFDELLRQANPVQERPLNNFLAALARAPALTVALFSLISKGARRRVAQPNVFTYGVLMDCCCRAHRPDLALAFFGRFLRTGLEADQVVFNTLLKGLCHAKQADEAVNVLLHRMPDLGCTPNVVAYNTVIHGFFREGQVGKACDMFHGMAHKGVMPNVVTYNSVIDALCKARAMDKAETVLSQMVNDGVGPNNVTYDSLIHGYSSLGNLKEAVRVFKEMSRRFTPDVVTCTSLMAFLCKNGKSKEAAEIFDSMATKGLKRDTVSYAILLHGYATEGCLVDMINLFNSMATDCILPNCHIFNILINAYAKSGKLDKAMLIFNEMQKQGVSPDLTRWLIWEYDRMQLFIIP

SEQ ID NO: 982 - protein, 411 aa, Triticum aestivum
MPRFSSTTSMSSLRLRLPLRLHARHSSSASQPSHSQGWDPHAAFAAATERARSGSLTPADAHHLFDELLRQANPVQERPLNNFLAALARAPALTVALFSLISKGARRRVAQPNVFTYGVLMDCCCRAHRPDLALAFFGRFLRTGLEADQVVFNTLLKGLCHAKQADEAVNVLLHRMPDLGCTPNVVAYNTVIHGFFREGQVGKACDMFHGMAHKGVMPNVVTYNSVIDALCKARAMDKAETVLSQMVNDGVGPNNVTYNSLIHGYSSLGNLKEAVRVFKEMSRRFTPDVVTCTSLMAFLCKNGKSKEAAEIFDSMATKGLKRDTVSYAILLHGYATEGCLVDMINLFNSMATDCILPNCHIFNILINAYAKSGKLDKAMLIFNEMQKQGVSPDLTRWLIWEYDRMQLFIIP

SEQ ID NO: 983 - protein, 409 aa, Triticum aestivum
MPCQHPPWPAPARPTTCELSRLTSAAARAELIPASAAAASPLPPRCPRAAVLLATPPSLHSTTPMSRIRLRRSRLFSSCATTPPPAGSWSPHAAFAAATERALAGKLSGEDAHHLFDELLRQATPVPERSLNGFLTALARAPDSSTFRNGPALARAPDSSTFRNGPALAIALFNRLCREEAGSRVAWPTVCTYNILMDCRCRTRRPDLGPAFLGRLLRTGLKTNQIVANTLLKCLCYAKRTDEAVNVLLHKMSELGCVPDAISYNTVLKRLCEDSRSQGALDLLRTVAKEGGVGSLDVVSHGTVIHGFFKEGETGKACNLFHEMTQQGIVPNVVTYNLIIDALCKARAMDKAELILRQMVDNGVRPDTVTCSSIMSSLCKHGRSKEAAEIFDSMTAKGLKADVFSYSVS

SEQ ID NO: 984 - protein, 409 aa, Triticum aestivum; identical to SEQ ID NO: 983

SEQ ID NO: 985 - protein, 224 aa, Triticum aestivum
MPCQHPPWPAPARPTTCELSRLTSAAARAELIPASAAAASPLSPRRPRAAVLLATPPSLHSTTPMSRIRLRRSRLFSSCATTPPPAGSWSPHAAFAAATERALAGKLSGEDAHHLFDELLRQATPVPERPLNGFLTALARAPDSSTFRNGPALARAPDSSTFRNGPALAIALFNRLCREEAGSRVAWPTVCTYNILMDCCCRTRRPDLGPAFLGRLLRTGLKTN

SEQ ID NO: 986 - protein, 409 aa, Triticum aestivum; identical to SEQ ID NO: 983

SEQ ID NO: 987 - protein, 367 aa, Triticum aestivum
MPVMPRFYSTTPMPRLLRRLSSTSTSTSGPSRCWDPSAALAAATERVRAGTLSPADARHLFDELLQRPTPVPGQALNGFLAALARAPASAACGDSPALAVSLFNRLCREASPHASPLTVHTYSILMDCCCRARRPDLGLAFFGRLLRTGLRTDGVDAYALIKCFCLAKRTDEAVSVLLHRLSELGCVPDALSYSVVLKVLCDDSRSQRALDLLRMMSKEGGVCAPNVVPYSTVIHGFCKEGKVSKACDLFNKMGQQGVKPNVVTYTSIIDALCKARAMDKAESFLRHMVDNDVRPNNVTYKCIIQGYSSLGLWNEAVKIFREMTSRGLMLDDVTRNSFVASLCNHGRSKEAAEIAHQMIESETTVSN

SEQ ID NO: 988 - protein, 367 aa, Triticum aestivum; identical to SEQ ID NO: 987

SEQ ID NO: 989 - protein, 367 aa, Triticum aestivum; identical to SEQ ID NO: 987

SEQ ID NO: 990 - protein, 367 aa, Triticum aestivum; identical to SEQ ID NO: 987

SEQ ID NO: 991 - protein, 367 aa, Triticum aestivum; identical to SEQ ID NO: 987

SEQ ID NO: 992 - protein, 367 aa, Triticum aestivum; identical to SEQ ID NO: 987

SEQ ID NO: 993 - protein, 370 aa, Triticum aestivum
MPAARLSSFKAPSRERRPPLAALAAATERVRAGTLSRQDAHHLFDELLSQAATVPVRKLNNFLAALARAPPSTACSDGPGLAIALFNRMSRGAGARVVSPTLCTYSILIDCCCRARRPDLVVAFFGRLLRLGLLLEVISFNNLLKGLCQAKRSNEALDMLLHRTPELHCAPDVFSYNIVINGCLKEGEVDKACNLFHEMPQLGVQPDVVTYTSIMDALSKSGAMDKAEVLLRQMVDQGIEPNIKTYSYLIHGYSTFGQWKEALRVFKEMASLGVVPDVVTLTSLIDSLCKHRRTKEAREIFDSMAAKGLKPNIVSYSTMLNGYVKEGSFEDMTDLFNSMVRNGIVPNHHIFNILINAYAKRGGVKCTVGP

SEQ ID NO: 994 - protein, 356 aa, Triticum aestivum
MSRLRLRLPRGSSSPTTLIPRLRLLRRCSTSTSTSSPSRSWSPRDAFAAATERVRAGTLSLEDAHKLFDELLGQATPVPERSLNGFLAALARAPASGACIRDGPALAVALFNRVCREEAGAQVAALTVCTYNILMDCCCRARRPDLGLALFGCFLRKGLKTDQTGANTFLKCLCYAKRTDEAVNVLLHRMSELGCVPNAVSYNTVLKGLCDNSMSQRALDLLQMVAGKGGGCFPDVVAYSTVIHGFFKEGETGKACSLFHEMMQQGIVPSVVTYNSIIDALCKVREVDKAELVLRQMVAKGAQPDTVTYNCMINGYATSGRLKAGVLHQMLLLATRSWPPFASTEVAKKLQNFLIP

SEQ ID NO: 995 - protein, 331 aa, Triticum aestivum
MAPNHFVYNILISAYGQEETVGEVMHIFTKMRQEGLNPDVANYGAVINLLSSIGRMDDAKSQYNQMITEGLLPGIIVFTPLISGFCSCGKWEKVPELFSEMLDRGICPNTVFFNAIMDRLCKNGRVMEAQDLFDLMVHMGVKPDVCTYNTLIGGYLFVGKMDEVRKLLDNMVSIGLKPDVITYSILIDGYSKNGRIDDALVVSREMLAGKVKPCVITFNIMIGALLKCGRKAETKDLFDGIWANGLVPDVITYSLMIQKLIEEGSLQESDDLFLSMEKNGCVADSHMLNAIVRSLLRKGEVPRAGTYLSKIDERVFTLEASTCFRGERPRI

SEQ ID NO: 996 - protein, 411 aa, Triticum aestivum
MWASHLLDPHVIDTKVGALMHGSIVPSARASRQLTRQSVPHPPPVTLLLLLLLYLADVRLPPPLLLHFITLMSSIHLRHCSTMPMSHVCLRRRLSSSSSSFSNCTSPPSPPWSPHAAFAAATERVRARTLSPEDAHHLFDVLFQQATPVPERSLDGFLAALSRATPSEACGDGPALALTLFNRVCREEAGMQVVPPTIFTYGILMNCCCRERRPDLGLAFFGRILKAGLKTNLITANTVLKCLYCAKHTDEAVDMLLHRMSDLGCVPDDFSYNTVLHGFFKEGKIGKACNLFHEMMLQGFVPDVVTYNLIIEALCKARAMDNAELFLRQMVDNVVPPDKVTYTSMIHGYSTLGRWKEATKMFREMTSRGLIPNIVTWSSFMDSLCKHGKSKEAAEIFFSMAGKGHKPNIVS

SEQ ID NO: 997 - protein, 338 aa, Triticum aestivum
MSSIHLRHCSTMPMSHVCLRRRLSSSSSSSNCTSPPSPPWSPHAAFPAATERVRARTLSPEDAHHLFDVLFQQATPVPERSLDGFLAALSRATPSEACGDGPALALTLFNRVYREEAGMQVVPPTIFTYGILMNCCCRERPDLGLAFFGRILKAGLKTNLIAANTVLKCLYCAKHTDEAVDMLLHRMSDLGCVPDDFSYNTVLHGFFKEGKIGKARNLFHEMMLQGFVPDVVTYNLIIEALCKARAMDNAELFLRQMVDNVVPPDKVTYTSMIHGYSTLGRWKEATKMFREMTSRGLIPNIVTWSSFMDSLCKHGKSKEAAEIFFSMAGKGHKPNIVS

SEQ ID NO: 998 - protein, 338 aa, Triticum aestivum; identical to SEQ ID NO: 997

SEQ ID NO: 999 - protein, 340 aa, Triticum aestivum
MSSIHLRHCSTMPMSHVCLRRRLSSSSSSFSNCTSPPSPPWSPHAAFAAATERVRARTLSPEDAHHLFDVLFQQATPVPERSLDGFLAALSRATPSEACGDGPALALTLFNRVCREEAGMQVVPPTIFTYGILMNCCCRERRPDLGLAFFGRILKAGLKTNLITANTVLKCLYCAKHTDEAVDMLLHRMSDLGCVPDDFSYNTVLHGFFKEGKIGKACNLFHEMMLQGFVPDVVTYNLIIEALCKARAMDNAELFLRQMVDNVVPPDKVTYTSMIHGYSTLGRWKEATKMFREMTSRGLIPNIVTWSSFMDSLCKHGKSKEAAEIFFSMAGKGHKPNIVS

SEQ ID NO: 1000 - protein, 338 aa, Triticum aestivum; identical to SEQ ID NO: 997

SEQ ID NO: 1001 - protein, 392 aa, Triticum aestivum
MHGSIVPSARASRQLTRQSVPHPPPVTLLLLLLLYLADVRLPPPLLLHFITLMSSIHLRHCSTMPMSHVCLRRRLSSSSSSFSNCTSPPSPPWSPHAAFAAATERVRARTLSPEDAHHLFDVLFQQATPVPERSLDGFLAALSRATPSEACGDGPALALTLFNRVCREEAGMQVVPPTIFTYGILMNCCCRERRPDLGLAFFGRILKAGLKTNLITANTVLKCLYCAKHTDEAVDMLLHRMSDLGCVPDDFSYNTVLHGFFKEGKIGKACNLFHEMMLQGFVPDVVTYNLIIEALCKARAMDNAELFLRQMVDNVVPPDKVTYTSMIHGYSTLGRWKEATKMFREMTSRGLIPNIVTWSSFMDSLCKHGKSKEAAEIFFSMAGKGHKPNIVS

SEQ ID NO: 1002 - protein, 221 aa, Triticum aestivum
MQVVPPTIFTYGILMNCCCRERRPDLGLAFFGRILKAGLKTNLITANTVLKCLYCAKHTDEAVDMLLHRMSDLGCVPDDFSYNTVLHGFFKEGKIGKACNLFHEMMLQGFVPDVVTYNLIIEALCKARAMDNAELFLRQMVDNVVPPDKVTYTSMIHGYSTLGRWKEATKMFREMTSRGLIPNIVTWSSFMDSLCKHGKSKEAAEIFFSMAGKGHKPNIVS

SEQ ID NO: 1003 - protein, 407 aa, Triticum aestivum
MAMKGLKPDNVSYAILLHGYATEGCLVDMINLFNSMERNCILPDCCIFNILINAYAKSGKLDKAMLIFNEMQKQGVSPDAVTYLPVIDAFCKKGRLDDAMIMFNQMIDTGVRPDTAVYTSLIQGFCTHGDLVKAKELVTEMMNKGIPPPDIKFFHSIMQNLCTEGRVIEARDILGLIAHIGMRPNVCTFNILIGGYCLVRKMEDASKIFDDMMSYGLEPSNITYGILINGYCKNLRIDDGLILFKEMLRKGVKPTTFNYNVILDGLFLAGRTVAAKEKFHEMAESGADVCIDTYCIVHRSQHKKRHGRNEARPPGGRRTAGCTRAHSTTTASPRGGLAGTRSCRREDAGQPGHGNGWPGEVERMGGWEEEDASHRAVPATMARRSRGGDPRSATRRGRGEEHRHDDH

SEQ ID NO: 1004 - protein, 407 aa, Triticum aestivum; identical to SEQ ID NO: 1003

SEQ ID NO: 1005 - protein, 407 aa, Triticum aestivum; identical to SEQ ID NO: 1003

SEQ ID NO: 1006 - protein, 407 aa, Triticum aestivum; identical to SEQ ID NO: 1003

SEQ ID NO: 1007 - protein, 407 aa, Triticum aestivum
MAMKGLKPDNVSYAILLHGYATEGCLVDMINLFNSMERNCILPDCCIFNILINAYAKSGKLDKAMLIFNEMQKQGVSPDAVTYLPIIDAFCKKGRLDDAMIMFNQMIDTGVRPDTAVYTSLIQGFCTHGDLVKAKELVTEMMNKGIPPPDIKFFHSIMQNLCTEGRVIEARDILGLIAHIGMRPNVCTFNILIGGYCLVRKMEDASKIFDDMMSYGLEPSNITYGILINGYCKNLRIDDGLILFKEMLRKGVKPTTFNYNVILDGLFLAGRTVAAKEKFHEMAESGADVCIDTYCIVHRSQHKKRHGRNEARPPGGRRTAGCTRAHSTTTASPRGGLAGTRSCRREDAGQPGHGNGWPGEVERMGGWEEEDASHRAVPATMARRSRGGDPRSATRRGRGEEHRHDDH

SEQ ID NO: 1008 - protein, 405 aa, Triticum aestivum
MAMKGLKPDNVSYAILLHGYATEGCLVDMINLFNSMERNCILPDCCIFNILINAYAKSGKLDKAMLIFNEMQKQGVSPDAVTYLPIIDAFCKKGRLDDAMIMFNQMIDTGVRPDTAVYTSLIQGFCTHGDLVKAKELVTEMMNKGIPPPDIKFFHSIMQNLCTEGRVIEARDILGLIAHIGMRPNVCTFNILIGGYCLVRKMEDASKIFDDMMSYGLEPSNITYGILINGYCKNLRIDDGLILFKEMLRKGVKPTTFNYNVILDGLFLAGRTVAAKEKFHEMAESGADVCIDTYCIVHRSQHKKRHGRNEARPPGGRRTAGCTRAHSTTTASPRGGLAGTRSCRREDAGQPGHGNGWPGEVERMGGWEEEDASHRAVPATMARRSRGGDPRSATRRGRGEEHRHD

SEQ ID NO: 1009 - protein, 391 aa, Triticum aestivum
MYISSLDLKFLGVVATFLANIHILFRNFWKYLRYIFKHGAPGVYKDGSTRYSPGRAHPMPRLYPTTPMLRLLPLPSRRWDPRGAFASATERARAGTLSPEDAHHLFDELLLQANPVPERSLNGFLAALARAPSSAALRDGPSLALGLFNRVCREEAGPRVVPPTVCTYNILMDSCCRARRPDLGLAFFDRFLRMGLKADQIVANNLLKCLCHARRTHEAINVLLHRMSEFGCVPNVISYSIVLKSLCDDSRSQQAFDLLQMVRKEGGAGSLNVVAYSTVIHAFFKEGEASKACDLFHEMMQQGIVPNVVTYSSIIDALCKVRAMDKAKLVLQQMVDNGVRPNMYTWNSFMYSLCKNGRSKEAAEFFDSMTPKGLKPNIVVYSTLLHGYASE

SEQ ID NO: 1010 - protein, 391 aa, Triticum aestivum; identical to SEQ ID NO: 1009

SEQ ID NO: 1011 - protein, 391 aa, Triticum aestivum; identical to SEQ ID NO: 1009

SEQ ID NO: 1012 - protein, 391 aa, Triticum aestivum; identical to SEQ ID NO: 1009

SEQ ID NO: 1013 - protein, 391 aa, Triticum aestivum; identical to SEQ ID NO: 1009

SEQ ID NO: 1014 - protein, 391 aa, Triticum aestivum; identical to SEQ ID NO: 1009

SEQ ID NO: 1015 - protein, 391 aa, Triticum aestivum
MYISSLDLKFLGVVATFLANIHILFRNFWKYLRYVFKHGAPGVYKDGSTRYSPGRAHPMPRLYPTTPMLRLLPLPSRRWDPRGAFASATERVRAGTLSPEDAHHLFDELLLQANPVPERSLNGFLAALARAPSSAALRDGPSLALGLFNRVCQEEAGPRVVPPTVCTYNILMDSCCRARRPDLGLAFFGRFLRMGLKADQIVANNLLKCLCHARRTDEAINVLLHRMSEFGCVPNVISYSIVLKSLCDDSRSQQAFDLLQMVRKEGGAGSLNVVAYSTVIHAFFKEGEASKACDLFHEMMQQGIVPNVVTYSSIIDALCKVRAMDKAKLVLQQMVDNGVRPNMYTWNSFMYSLCKNGRSKEAAEFFDSMTSKGLKPNIVVYSTLLHGYASE

SEQ ID NO: 1016 - protein, 331 aa, Triticum aestivum
MAPNHFVYNILISAYAQEETVGEVMHIFTKMRQEGLNPDVANYGAVINLLSSIGRMDDAMSQYNQMITEGLLPGIIVFTPLISGFCSCGKWEKVPELFSEMLDRGICPNTVFFNTIMDRLCKNGRVMEAQDLFDLMVHMGVKPDVCTYNTLIGGYLFVGKMDEVRKLLDNMVSIGLKPDVITYSILIDGYSKNGRIDDALVFSREMLAGKVKPCVITFNIMIGALLKCGRKAETKDLFDGIWANGLVPDVITYSLMIQKLIEEGSLQESDDLFLSMEKNGCVADSHMLNAIVRSLLRKGEVPRAGTYLSKIDERVFTLEASTCFRGERPRI

SEQ ID NO: 1017 - protein, 331 aa, Triticum aestivum; identical to SEQ ID NO: 1016

SEQ ID NO: 1018 - protein, 331 aa, Triticum aestivum; identical to SEQ ID NO: 1016

SEQ ID NO: 1019 - protein, 363 aa, Triticum aestivum
MSELGCVPDALSYSVVLKVLCDDSRSQRALDLLQMMSKEGGGCAPNVVAYSTFIHGFCKEGKVSQACDLFDEMVQQGVKPNVVTYTSVIDALCKARAMDKAESFLRHMVNHGVRPNNVTYKYMIQGYSTLGWLKEAVKIFRETTSRGLILDDVTRNLFVASLCNHGRSKEAAEFAHQMIETGTTVSISTYSIILGELCRNNCTEEAIILFRKLGAVNVKFDITIFNTMIDAMYRVQRREEANILFAAISANGLVPNASTYRIMITSIVKEGSMEEADHMFSSMETSGYAPSSVLLNDIIRMLLEKGEIVKAGNYLSKVDGKCISLEASTGLLMMHLFSREGKYHEQIRSLPARYEFFGVSTVE

SEQ ID NO: 1020 - protein, 363 aa, Triticum aestivum
MSELGCVPDALSYSVVLKVLCDDSRSQRALDLLQMMSKEGGGCAPNVVAYRTFIHGFCKEGKVSQACDLFDEMVQQGVKPNVVTYTSVIDALCKARAMDKAESFLRHMVNHGVRPNNVTYKYMIQGYSTLGWWKEAVKIFRETTSRGLILDDVTRNLFVASLCNHGRSKEAAEFAHQMIETGTTVSISTYSIILGELCRNNCTEEAIILFRKLGAVNVKFDITIFNTMIDAMYRVQRREEANILFAAISANGLVPNASTYRIMITSIVKEGSMEEADHMFSSMETSGYAPSSVLLNDIIRMLLEKGEIVKAGNYLSKVDGKCISLEASTGLLMMHLFSREGKYHEQIRSLPARYEFFGVSTVE

SEQ ID NO: 1021 - protein, 363 aa, Triticum aestivum; identical to SEQ ID NO: 1019

SEQ ID NO: 1022 - protein, 363 aa, Triticum aestivum; identical to SEQ ID NO: 1019

SEQ ID NO: 1023 - protein, 363 aa, Triticum aestivum; identical to SEQ ID NO: 1020

SEQ ID NO: 1024 - protein, 363 aa, Triticum aestivum; identical to SEQ ID NO: 1019

SEQ ID NO: 1025 - protein, 368 aa, Triticum aestivum
MIDTGVRPDTAVYRSLIQGFCTHGDLVKAKEYVTEMMNKGMLPPDIMFFSSIMQNLCTEGRVIEARDILDLMVHIGMRPDVPIFNLLIGGYCLVCKMEDATKVFDDMVSYGLEPCNITDGMLINGYCKNRRIDDGLILFKEMLHKGLKPTTFNYNVILDGLFLAGRTVAAKEKFNEMVESGVSMCISTYSIVLGGLCRNSCSSEAITLFQKLSTMNVKFDIRIVNIMIGAFYRVRRNQEAKDLFAAIPSNGLAANVVTYSIMIINLIKEGSVEEADNLFLSMEKSGCTADSCMLNHIIRRLLEKGEMVKAGNYISKVDANSYSLEAKTVSLLISLFSRKGKYREHITLLPTKYQFREEAATVELFDTW

SEQ ID NO: 1026 - protein, 368 aa, Triticum aestivum; identical to SEQ ID NO: 1025

SEQ ID NO: 1027 - protein, 368 aa, Triticum aestivum; identical to SEQ ID NO: 1025

SEQ ID NO: 1028 - protein, 368 aa, Triticum aestivum; identical to SEQ ID NO: 1025

SEQ ID NO: 1029 - protein, 368 aa, Triticum aestivum; identical to SEQ ID NO: 1025

SEQ ID NO: 1030 - protein, 368 aa, Triticum aestivum; identical to SEQ ID NO: 1025

SEQ ID NO: 1031 - protein, 396 aa, Triticum aestivum
MREKGVSPDVVTYTTVIAALSRMGRLTDAVDKFDEMIAMGVQPSIPVYQSLIQGFCIDGDLVKAKELVSEMMNKGIPCPNIVFFNSVINSLCKEGRVMDAHDIFDLVIDIGERPDTITFSSLIDGYCLVGKMDKAFGMLNAMESVGVEPDIVTYSTLLDGYFKNGRIDDGLTLFREMPRKRIKPDTVTYGIILDGLFRSGRTVAAWKMFHEMIESGTTVTFSIYAIILGGFCRNNCADEAITLFHKLGAMNVKFNIAIVNTMINAMYKVGRREEAKELFAGILARGLVPNESTYGVMIKNLLKDGVVEDANNVFSSMDKSGIVPSSRLINDIIRLLLEKGEIAKAGYYLSKVDGKSISLEASTTSLMFSLFSMKGKYKEHMKLLPAKYQFFDELVD

SEQ ID NO: 1032 - protein, 277 aa, Triticum aestivum
MIKCNTEANDKTTTTNNWKTPGATVSGRYTDIVTYSTLLDGYFKNGRIDDGLTLFREMPRKRIKPDTVTYGIILDGLFRSVRIVAAWKMFHEMIESGTTVTFSIYAIILGGFCRNNCADEAITLFHKLGAMNVKFNIAIVNTMINAMYKVGRREEAKELFAGILARGLVPNESTYGVMIKNLLKDGAVEDANNVFSSMDKSGIVPSSRLINDIIRLLLEKGEIAKAGYYLSKVDGKSISLEASTTSLMFSLFSRKGKYKEHMKLLPAKYQFFDELVD

SEQ ID NO: 1033 - protein, 396 aa, Triticum aestivum; identical to SEQ ID NO: 1031

SEQ ID NO: 1034 - protein, 396 aa, Triticum aestivum; identical to SEQ ID NO: 1031

SEQ ID NO: 1035 - protein, 396 aa, Triticum aestivum; identical to SEQ ID NO: 1031

SEQ ID NO: 1036 - protein, 396 aa, Triticum aestivum; identical to SEQ ID NO: 1031

SEQ ID NO: 1037 - protein, 396 aa, Triticum aestivum; identical to SEQ ID NO: 1031

SEQ ID NO: 1038 - protein, 396 aa, Triticum aestivum
MDPTARIEGQYSTVIHTFCKKGRLDDAVIKFNQMIDTGVRPDTAVYSSLIQGFYTHGDLVKAKEYVTEMMKKGMLPPDIKFFHSIMQNLCTEGRVIEARDVLGLIAHIGMRPDVCTFNILIGGYCLVGKMEDASKIFDDMMSYGLEPSNITYGILINGYCKNRRIDDGLILFKEMLHKGLKPTTFNYNVILDGLFLAGRTVAAKEKFDEMVESGVSVCIGTYSTVLGGLCRNNCSGEAITLFQKLSTMDVKFNIIIVNIMIDAFYKVQRNQEAKDLFAAVSANGLVANVFTYTIMMKNLIKEGSVGEADDLFLSMEKSCCTADSYMLNLIVRMLLGKGEIVKAGNYISKIDAKSYSLEAKTVSLLISLFSGKGKYREHIGLLHTKYPFREEAATVV

SEQ ID NO: 1039 - protein, 396 aa, Triticum aestivum
MDPTARIEGQYSTVIHTFCKKGRLDDAVIKFNQMIDTGVRPDTAVYSSLIQGFYTHGDLVKAKEYVTEMMKKGMLPPDIKFFHSIMQNLCTEGRVIEARDVLGLIAHIGMRPDVCTFNILIGGYCLVGKMEDASKIFDDMMSYGLEPSNITYGILINGYCKNRRIDDGLILFKEMLHKGLKPTTFNYNVILDGLFLAGRTVAAKEKFDEMVESGVSVCIGTYSTVLGGLCRNNCSGEAITLFQKLSTMDVKFNIIIVNIMIDAFYKVQRNQEAKDLFAAVSANGLVANVFTYTIMMKNLIKEGSVEEADDLFLSMEKSGCTADSYMLNLIVRMLLGKGEIVKAGNYISKIDAKSYSLEAKTVSLLISLFSGKGKYREHIGLLPAKYRFREEAATVV

SEQ ID NO: 1040 - protein, 395 aa, Triticum aestivum
MVSLGQKPTVTTYSILLHGYAMEQSFHEMHCLIDLMVGNGIAPNHFVYNILISAYAQEETVGEVMHIFTKMRQEGLNPDVANYGAVINLLSSIGRMDDAMSQYNQMITEGLLPGIIVFTPLISGFCSCGKWEKVDELFSEMLDRGICPDTVFFNTVMDHLCKNGRVIEAQDLFDLMVHMGVKPFVRDYNTLIHGYCLVGKMDEGRKLLDNMCSIGLKPDDFTYSILIDGYSMKGRIGDALIVVREMLDRKVKPSIITFNIMIGALLKGGRKEEAKDLFDGIWAKGLVPDVVTYRLMIQKLIEEGSLQDSDDLFLSMEKNGCVADSRMLNAIVRSLLQKGDVPRAGTYLSKIDERRFTFEASTASLLTSLASGGKGQEYKELLPEEYHSFLEQGTG

SEQ ID NO: 1041 - protein, 395 aa, Triticum aestivum; identical to SEQ ID NO: 1040

SEQ ID NO: 1042 - protein, 395 aa, Triticum aestivum; identical to SEQ ID NO: 1040

SEQ ID NO: 1043 - protein, 374 aa, Triticum aestivum
MEQSFHEMHCLIDLMVGNGIAPNHFVYNILISAYAQEETVGEVMHIFTKMQQEGLNPDVANYGAVINLLSSIGRMDDAMSQYNQMITEGLLPGIIVFTPLISGFCSCGKWEKVDELFSEMLDRGICPDTVFFNTVMDHLCKNGRVIEAQDLFDLMVNMGVKPFVRDYNTLIHGYCLVGKMDEGRKLLDNMCSIGLKPDDFTYSILIDGYSMKGRIGDALIVVREMLDGKVKPSIITFNIMIGALLKGGRKEEAKDLFDGIWAKGLVPDVVTYRLMIQKLIEEGSLQESDDLFLSMEKNGCVADSRMLNAIVRSLLQKGDVPRAGTYLSKIDERRFTFEASTASLLTALASGGKGQEYKELLPEEYHSFLEQGTG

SEQ ID NO: 1044 - protein, 374 aa, Triticum aestivum
MSRLRLLRRSSSSTTLIPRLRLLRRCSTSTSTSPPSGPWSPRDAFVAAIERVRAGTLSPEDAHHLFDDLLGQATPVPDRTMNGVLARATSPAACIRDGPALAVALFNRVCREEAGPHVAAPTVHTYGILMDCCCRARRPDLGLALFGRFLRTGLKANEIVATTFLKCLCCAKRTEEAVKVLLHRMPELGCVPNAISYSIVLKSLCENSMSQQALDLLQMATKEGGCLPDVVAYSAIIHGFFKEGEIDKACHLFHEMMRQGVVPTVVTYNIIIDALCKAGEMDKAELVFQRMARNGARPNKATCNGSKFSSLTDGYCSVAKMDKTFKLLDAMISVGIEPDAVTYSALLDGYFKNGRIDDGLTLFREMSCELNLQL

SEQ ID NO: 1045 - protein, 374 aa, Triticum aestivum; identical to SEQ ID NO: 1044

SEQ ID NO: 1046 - protein, 374 aa, Triticum aestivum
MSRLRLLRRSSSSTTLIPRLRLLRRYSTSTSTSPPSGPWSPRDAFVAAIERVRAGTLSPEDAHHLFDDLLGQATPVPDRTMNGVLARATSPAACIRDGPALAVALFNRVCREEAGPHVAAPTVHTYGILMDCCCRARRPDLGLALFGRFLRTGLKANEIVATTFLKCLCCAKRTEEAVKVLLHRMPELGCVPNAISYSIVLKSLCENSMSQQALDLLQMATKEGGCLPDVVAYSAIIHGFFKEGEIDKACHLFHEMMRQGVVPTVVTYNIIIDALCKAGEMDKAELVFQRMARNGAQPNKATCNGSKFSSLTDGYCSVAKMDKTFKLLDAMISVGIEPDAVTYSALLDGYFKNGRIDDGLTLFREMSCELNLQL

SEQ ID NO: 1047 - protein, 374 aa, Triticum aestivum; identical to SEQ ID NO: 1044

SEQ ID NO: 1048 - protein, 374 aa, Triticum aestivum; identical to SEQ ID NO: 1044

SEQ ID NO: 1049 - protein, 374 aa, Triticum aestivum; identical to SEQ ID NO: 1044

SEQ ID NO: 1050 - protein, 374 aa, Triticum aestivum; identical to SEQ ID NO: 1044

SEQ ID NO: 1051 - protein, 351 aa, Triticum aestivum
MKLKMPGPGGIITLVSNPYIALRAENKTAALALEALSEALAAEELTALRSTVNRDDVILDKRSKSTSFKPADEIVKFQVHPTDPTKTTSIRAQLNPVVDAALREFLRENWDIFAWHPSDMPGIPRRLAEHSLNILKGVINNLSKEGNVKDAQDMFDFIVGIGHQPDVIMYNSLMDGYCLVGKVEEAMTVLDAMKSAGLQPDAITYAILLNGYCKIGRIDDGLSLFREISLSRVKPTTIMYNIILDGLFCCGRTVFAKEEFDTMIESGIPVGIDTCTIVLSGLCKNNCTDEAIELFKKLCAMNVKFDVIILTTMISAMFKTRRIEEAKDLFATISTIGLVPSVVTYSVIFFF

SEQ ID NO: 1052 - protein, 314 aa, Triticum aestivum
MDCCCRARRPDLGPAFLGRLLRTGLKTNQIVANTLLKCLCYAKRTDEAVNVLLHKMSELGCVPDAISYNTVLKSLCEDSRSQEALDLLWMVAKEGGVGSLDVVSHSTVIHGFFKEGETGKACNLFHEMTHQGIVPNVMTYNLIIAALCKARAMDKAELILRQMVDNGVRPNTVTCSSLMSSLCKHGRSKEAAEIFDSMTAKGLKPDIVAYSILLHGYATEGCLADMIDLFNSMKNNGIEATCQVFNILIGAYAKCGMMDEAMLIFTEMRRQGVSPDVFTYTTVIVSLFRTSRLADAIDKFDEMIAIGVQPNRPV

SEQ ID NO: 1053 - protein, 314 aa, Triticum aestivum; identical to SEQ ID NO: 1052

SEQ ID NO: 1054 - protein, 314 aa, Triticum aestivum
MDCCCRARRPDLGPAFLGRLLRTGLKTNQIVANTLLKCLCYAKRTDEAVNVLLHKMSELGCVPDAISYNTVLKSLCEDSRSQEALDLLWTVAKEGGVGSLDVVSHSTVIHGFFKEGETGKACNLFHEMTHQGIVPNVMTYNLIIAALCKARAMDKAELILRQMVDNGVRPDTVTCSSLMSSLCKHGRSKEAAEIFDSMTAKGLKPDIVAYSILLHGYATEGCLADMIDLFNSMKNNGIEATCQVFNILIGAYAKCGMMDEAMLIFTEMRRQGVSPDVFTYTTVIVSLCRTSRLADAIDKFDEMIAIGVQPNRPV

SEQ ID NO: 1055 - protein, 314 aa, Triticum aestivum; identical to SEQ ID NO: 1052

SEQ ID NO: 1056 - protein, 314 aa, Triticum aestivum; identical to SEQ ID NO: 1052

SEQ ID NO: 1057 - protein, 259 aa, Triticum aestivum
MSELGCVPDAISYNTVLKSLCEDSRSQEALDLLWTVAKEGGVGSLDVVSHSTVIHGFFKEGETGKACNLFHEMTHQGIVPNVMTYNLIIAALCKARAMDKAELILRQMVDNGVRPDTVTCSSLMSSLCKHGRSKEAAEIFDSMTAKGLKPDIVAYSILLHGYATEGCLADMIDLFNSMKNDGIEATCQVFNILIGAYAKCGMMDEAMLIFTEMRRQGVSPDVFTYTTVIVSLFRTSRLADAIDKFDEMIAIGVQPNRPV

SEQ ID NO: 1058 - protein, 314 aa, Triticum aestivum; identical to SEQ ID NO: 1052

SEQ ID NO: 1059 - protein, 366 aa, Triticum aestivum
MCKAGAMDKTELVLRPMVDNGVRPDKMICNSMIHGYSTLGRWKEAGKVFREMTSRGLIPDIFTWNSFMGSLCKHGRSKEAAEIFFSMAAKGHKPNIVSYILLLRVYANEGRFADMMSLLNLMEGDGIVANCQIFTILIDAYAKQGMIDEAMLVLTDMRGQGLSPDVFTYSALLSALCRMGRLADAMDKFTQMIGTGVQPNTVVYHSLVQGLCTHGDLAKAKELVSKMMNKGIARPNIALFSSIMASLCNEGRVMDAHHIFDLVTDIGEKPNIIMFTTLIDGYCLVGKMDKACGVLDAMVSAGIEPNVVTYSTLVSGYCKNGRIDNGLILFRDMLRTAAAKKMFREIIESRIIVSISTYNIILGMTL

SEQ ID NO: 1060 - protein, 366 aa, Triticum aestivum; identical to SEQ ID NO: 1059

SEQ ID NO: 1061 - protein, 366 aa, Triticum aestivum; identical to SEQ ID NO: 1059

SEQ ID NO: 1062 - protein, 366 aa, Triticum aestivum; identical to SEQ ID NO: 1059

SEQ ID NO: 1063 - protein, 366 aa, Triticum aestivum
MCKAGAMDKTELVLRPMVDNGVRPDKMICNSMIHGYSTLGRWKEAGKVFREMTSRGLIPDIFTWNSFMGSLCKHGRSKEAAEIFFSMAAKGHKPNIVSYILLLRVYANEGRFADMMSLLNLMEGDGIVANCQIFTILIDAYAKQGMVDEAMLVLTDMRGQGLSPDVFTYSALLSALCRMGRLADAMDKFTQMIGTGVQPNTVVYHSLVQGLCTHGDLAKAKELVSKMMNKGIARPNIALFSSIMASLCNEGRVMDAHHIFDLVTDIGEKPNIIMFTTLIDGYCLVGKMDKACGVLDAMVSAGIEPNVVTYSTLVSGYCKNGRIDNGLILFRDMLRTAAAKKMFREIIESRIIVSISTYNIILGMTL

SEQ ID NO: 1064 - protein, 366 aa, Triticum aestivum; identical to SEQ ID NO: 1059

SEQ ID NO: 1065 - protein, 375 aa, Triticum aestivum
MPRLRRFSTVPMLHLLRRSSSSTSTSLPSHPWSPHEAFAAATERVRAGTLTPEEAHNLFDGFPGPQPLPERLPCRPRPCAGLRNLPQRWPCPRPCPLQPRMPRRSRPAGGILMGCFCGAHRPDLGLALFGRFLGTGLKTNKIVATTFLKCLCYAKRTDEAVNLLLRRMPELGCVPDAISYTIVLKSLCENSMSQRALDLLQMVAEGGGACSLNVVVYSTVIHGFFKEGETGKACNLFHEMIHQGVVPNVVTYSSIIDALCKARAMDKAELVLQQMVDSGAQPNNVTYNCMIHGYSTSGQLKEAAKMFRKMTSHGLVPNAVTCSSLMTSLCKHGRSKEAAEIFYSMTAKGHKPDAVSYRILLHGYANEGCFADMID

SEQ ID NO: 1066 - protein, 389 aa, Triticum aestivum
MFDVYKKCAKRREELLLGRPLVHTSVGLEMTSSPMCRIGLRHRRSSSSTSLMSRLRLLGRSSSSTSTSPRSRPWSPHAAFAAATQRVSAGTFSPEHAHQLFDELLRQGTPVPDFSLDGFLAALARATSSAACRDGPALALALFNRLCREEAGPRVAQPTIFTYGVLMNCCVRTRRPQLGLAFFGRVLRTDLKTNTIVFSSLLKCLCHAKRTDEDVSVLLHRMPELGCVPDAFSYTIVLKSLCDDSSSQRALDLLQTMEKGGGVCSPDVVSYTTVIHGLLKEGEVSKACSLFDEMVQQGVVPNVVTYSSIIDALCKAGVMDKTELVLRQMVDSGIQPDNVTYTSMIHGYSTLGRWKEADKPGYHTRCCYLDLIHDLPLQAWKKQRSCRNY

SEQ ID NO: 1067 - protein, 344 aa, Triticum aestivum
MKRTEEALNVLLHKMPNDLPNVISYSVILKSFCDNGRSQLALDLLQMMAKKGADHSPDVMSYNMVIDGFFKEGEVSKACDLFQEMIRQGIVPTEVTYSSIINALCKARAMDKAEVVLRSMVHNGAQPDAVTYNSLIQGYSTLGQLKEVARLLKVMRSQGVMPSVVTYNLLMTCLCKHGKTKEAEKIFYSMAVNGRKPDVISYSILLHGYAKEGSLIDMIDLCERMARDGVVPNLHCFNILINAYAKHGMMGVALLFFEDMLKQGVKPSEFTYLTVISAFCKMGRMDDAMEKFREMIDMGVPVDTEVYMCIVEGYFKNGDSVKAKDFITKMKNKDIPNRPQKGNY

SEQ ID NO: 1068 - protein, 344 aa, Triticum aestivum; identical to SEQ ID NO: 1067

SEQ ID NO: 1069 - protein, 344 aa, Triticum aestivum; identical to SEQ ID NO: 1067

SEQ ID NO: 1070 - protein, 344 aa, Triticum aestivum; identical to SEQ ID NO: 1067

SEQ ID NO: 1071 - protein, 344 aa, Triticum aestivum; identical to SEQ ID NO: 1067

SEQ ID NO: 1072 - protein, 267 aa, Triticum aestivum
MKRTEEALNVLLHKMPNDLPNVISYSVILKSFYDNGRSQLALDLLQMMAKKGADHSPDVMSYNMVIDGFFKEGEVSKACDLFQEMIRQGIVPTEVTYSSIINALCKARAMDKAEVVLRSMVHNGAQPDAVTYNSLIQGYSTLGQLKEVARLLKVMRSQGVMPSVVTYNSLMTCLCKHGKTKEAEKIFYSMAVNGRKPDVISYSILLHGYAKEGSLIDMIDLYERMARDGVVPNLHCFNILINAYAKHGMMDVALLFFEDMLKQGDEA

SEQ ID NO: 1073 - protein, 251 aa, Triticum aestivum
MSTARLCSTFTSSLKAPSRKPRAPRLAALAAATERVRAGTLTRQDAHKLFDKLLSQAATVPVRKLNNFLAALARAPPSAACSDGPGLAIALFNRMSRGAGARVASPTLCTYSILMDCCCRAGRPDLVLAFFSRLLRLGLSLNVISFSNLLKGLCQAKRSNEALDMLLHRTPELHCAPDVFSYNIVINGCLKEGEVDKACNLFHEMPQLGVQPDVVTYTSIMDALSKSGAMDKAEVLLRQMVDQGIEPNIKT

SEQ ID NO: 1074 - protein, 305 aa, Triticum aestivum
MGHVIKLGFTAEAIVNFNHLLKAICAEKKTSYAMDIVLRVMPEFNCTPNIFSYYILFKGLCNEKRSQEALELIQIMVEDGGCCRPDVVTYSTVIDGLLKEGEVDQAYSLFSEMLRQGVSPNIVTCNSIISGMCKLHAMDKAEEVLQQMFDRRILPDVATYTSLIHGYYSLGQCKEVDRILNEMCKHGVQPDIVTYNIQMDYLCKSGRCAEARNLLDSLIGLGQKPDVTTYSILLHGYAMEKSFDEMHCLIDLMVGNGVAPDHHIYNILISAYAKEETVGEVMDIFTKMRQQGLNPDVERIACSGD

SEQ ID NO: 1075 - protein, 305 aa, Triticum aestivum; identical to SEQ ID NO: 1074

SEQ ID NO: 1076 - protein, 305 aa, Triticum aestivum; identical to SEQ ID NO: 1074

SEQ ID NO: 1077 - protein, 329 aa, Triticum aestivum
MFEMMNGGILRPNIVFFNSVINSLYKEGRVMDAHDVLDLVIGIGERPDTITFSSLIDGYCLVGKTDKAFKILDAMESVGVEPDIVTYNTLLDGYFKNRRIDDALTLFREMPRKRIKPGTVTYGIMLDGLFRAGRTVAAKKMFHEMNESGTTVDISTYAIILGGFCRNNCADEAITLFHKLGAMNVKFNIAIVNTMINAMYKVGRREEAKELFAGILARGLVPNESTYGVMIKNLLKDGAVEDANNVFSSMDKSGIVPSSRLINDIIRLLLEKGEIAKAGYYLSKVDGKSISLEASTTSLMFSLFSRKGKYKENMKLLPAKYQFFDVLVD

SEQ ID NO: 1078 - protein, 304 aa, Triticum aestivum
MFEMMNGGILRPNIVFFNSVINSLYKEGRVMDAHDVLDLVIGIGERPDTITFSSLIDGYCLVGKTDKAFKILDAMESVGVEPDIVTYNTLLDGYFKNRRIDDALTLFREMPRKRIKPGTVTYGIMLDGLFRAGRTVAAKKMFHEMNESGTTVDISTYAIILGGFCRNNCADEAITLFHKLGAMNVKFNIAIVNTMINAMYKVGRREEAKELFAGILARGLVPNESTYGVMIKNLLKDGAVEDANNVFSSMDKSGIVPSSRLINDIIRLLLEKGNEKNSALQNIARPFSKCYTSYSALIACYISK

SEQ ID NO: 1079 - protein, 334 aa, Triticum aestivum
MNRSRAMKGLTAARRVTASVETTALSGLLSMTPEEACHRQVLDLVIGIGERPDTITFSSLIDGYCLVGKTEKAFKILDAMESVGVEPDIVTYNTLLDGYFKNRRIDDALTLFREMPRKRIKPGTVTYGIMLDGLFRAGRTVAAKKMFHEMNESGTTVDISTYAIILGGFCRNNCADEAITLFHKLGAMNVKFNIAIVNTMINAMYKVGRREEAKELFAGILARGLVPNESTYGVMIKNLLKDGAVEDANNVFSSMDKSGIVPSSRLINDIIRLLLEKGEIAKAGYYLSKVDGKSISLEASTTSLMFSLFSRKGKYKENMKLLPAKYQFFDVLVD

SEQ ID NO: 1080 - protein, 329 aa, Triticum aestivum; identical to SEQ ID NO: 1077

SEQ ID NO: 1081 - protein, 329 aa, Triticum aestivum; identical to SEQ ID NO: 1077

SEQ ID NO: 1082 - protein, 236 aa, Triticum aestivum
MDCCCRAHRLDLAFAFFGRLLRTGLKAGVIQVCTLLKGLCRAKRADEALDVLLHRMPELGGCTPNVVAYTTVIHGFFKEGQISKACYLFHEMALQGVTPDVVTYSSVIDALCKARAMDKAEYFLRQMVHNGVLPNNVTYNSLIHGYSSSGHWKEAVRVLKEMTSQGIIPDIVSYRILLHGYATEGCLVDMINLFNSMARYCILPDCHIFNILINAYAKSGKLDKAMLIFKECRNKE

SEQ ID NO: 1083 - protein, 315 aa, Triticum aestivum
MARLCYTTPMPHLRRCCSSSTSPPSRHWDPRPAFAAATERVRAGTLSPEDAHHLFDELLLQANPVPERSFNDFLAALARALSSAALRDGHSLALGIFNRVCREEAGPCVTPPTVCTYNILMDSCCRACHPNLGPAFFGRFLRTGLKADQIVAINLLKCLCHAKRKDEAVNMLLHRMSEFGCVPDAISYSIVLKSLCDDSRSQQALDLLQMVRKGGACSLDVVAYSTVIRSFFKEGEVSKACNLFHEMVQQGIVPNVVTYSLIIDALCKVRAMDKAKLVLQQMVDNGVRPNMYTCMELIHVLPLQEWRKQRSCRIF

SEQ ID NO: 1084 - protein, 315 aa, Triticum aestivum; identical to SEQ ID NO: 1083

SEQ ID NO: 1085 - protein, 315 aa, Triticum aestivum; identical to SEQ ID NO: 1083

SEQ ID NO: 1086 - protein, 315 aa, Triticum aestivum; identical to SEQ ID NO: 1083

SEQ ID NO: 1087 - protein, 315 aa, Triticum aestivum
MARLCYTTPMPHLRRCCSSYTSPPSRHWDPRPAFAAATERVRAGTLSPEDAHHLFDELLLQANPVPERSFNDFLAALAQALSSAALRDGHSLALGIFNRVCREEAGPCVTPPTVCTYNILMDSCCRACHPNLGPAFFGRFLRTGLKADQIVAINLLKCLCHAKRKDEAVNMLLHRMSEFGCVPDAISYSIVLKSLCDDSRSQQALDLLQMVRKGGACSLDVVAYSTVIRSFFKEGEVSKACNLFHEMVQQGIVPNVVTYRLIIDALCKVRAMDKAKLVLQQMVDNGVRPNMYTCMELIHVPPLQEWRKQRSCRIF

SEQ ID NO: 1088 - protein, 315 aa, Triticum aestivum; identical to SEQ ID NO: 1083

SEQ ID NO: 1089 - protein, 315 aa, Triticum aestivum; identical to SEQ ID NO: 1083

SEQ ID NO: 1090 - protein, 360 aa, Triticum aestivum
MTAKGHRANVVSYCILLHGYGNEGCFADMIDLFNSMERNGIAADCRVFNILIDAYAKHGMTDEAMLIFTEMREKGAGPDAFTYSTVIAALSRMGRLTDAMGKFSQMIAMGVQPDTTVYHSLIQGCCLHGDLVKAKELVCEMMNKGIPRPSIVFFNSVINSLCKEGRIMDAHDIFDLVIDIGERPDAITFSSLIDGYCLVGNMDKALKVLDVMESVGVEPNVITYNTLVNGYCRNGRIDDSLTLFREMPRKRIKPDTVSYCIIMNGLFRAGRTVAARKMFHEMTENGITVSISTYSIILRGLCRNNCADEAITLFQKLGTMNVKFDIAILNTMINAMYKGSKKGRSKGIVCYNISQWVGAQ

SEQ ID NO: 1091 - protein, 334 aa, Triticum aestivum
MASVGVQPNAVTLNSLIDSLCKHRRTKEAREIFDSMAAKGLKPNIVSYSTMLNGYVKEGCFDDMTDLFNSMVRNGIVPNHHIFNILINAYAKRGVMDEAMHMFEVMRQQGVNPDVFSYQIVMDSLRKMGRMDAALDKFNQMVNQGVSPNIVVYQCLVLGSCSHGDFVKAKELISEAVNRGLCSNSVFFYSVINDLCKEGKVKEAQDMFHFIVGIGQRPDVIMYTSLMDGYCLVGKVEEALRVLGAMKSAGLQPTAVTYGILLNGYCKIGRIAAGLSLFKEMSLSGVKPTTIFFRENAKEFAFHFIEQEENSSTGTTSQKEGHTHTHHRPHQTSR

SEQ ID NO: 1092 - protein, 381 aa, Triticum aestivum
MLFAKKGRLDDAVIKFNQMIDAGVRPDASVYRSLIQGFCTHGDLVKAKEYVTEMMKKGMLPPDIMFFSSIMQKLCTEGRVIEARDILDLIVRIGIRPDVFIFNILIGGYCLVRKMADASKIFDDMVSYGLEPCNSTYGILINGYCKNGRIDDGLILFKEMLPKGLKPTTFNYNVILDGLFLAGQTVAAKEKFDEMVESGVSVCIDTYSIVLGGLCRNNCAGEAITLFQKLSTTNVKFDIRIVNIMIDAFYRVRRNQEAKDLFAAVSANGLVANVFTYTVMMINLIEEGSLEEADTLFLSMERSGCTANSYMLNHIIRRLLERGEIVKAGNYMSKVDAKSYSLEAKTVSLLISLFLGKGRYREHMKLLPMKYQFLEEAATVE

SEQ ID NO: 1093 - protein, 381 aa, Triticum aestivum; identical to SEQ ID NO: 1092

SEQ ID NO: 1094 - protein, 381 aa, Triticum aestivum; identical to SEQ ID NO: 1092

SEQ ID NO: 1095 - protein, 381 aa, Triticum aestivum; identical to SEQ ID NO: 1092

SEQ ID NO: 1096 - protein, 333 aa, Triticum aestivum
MVDEVMHIFTKMRQQGLNPDVENYGAVVNLLSKIGRMDDAMSQFNQMITEGLAPDVIVFTPLISGFCSCGKWEKVDELFSEMLDRGICPDTVFFNTVMDHLCKNGRVIEAQDVFDLMVHMGVKPDVRSHVTLMHGYFADGKMDEMRKLLENMCSIGLKPDVVTYSILIDSYSKNGRIDDALVVFREMLDGVKPSIITFNIMIGVLLKGSRKEEAKDLFDGIWAKGLVPDVVTYSLMIQNLIEEGSLQESDDLFISMEKNGCAANSCMLNAIVRSLLQKEEILRAGTYLSKIDERRFTLEASTASLLTALVSGGEGQEYKELLHEKYSELLIEA

SEQ ID NO: 1097 - protein, 375 aa, Triticum aestivum
MTAKGLKPDIVVYCTLLHGYATEGCLADMINLFNSMEDNGIVANCKVFTILIDGYAKCGMIDEAMLIFTKMREQGVSPNVFTYAIVTAALCRMGRLSDAMDKLNEMIAMGLQPNKVVYRSLIQGFCTHGDLVKAKVLVSEMMNKGIPRPNMVFFNSVINSLCKEGRVTDAHDIFDLAINIGERPDVITFNSLIDGHCLAGKMDKAFGVLDAMVSAGIEPNVVTYNTLIDGYSRKGRIDDGLTLFREMMPNKIKPTTATYGAILHGLFRAGRTSPAKKMFNEMIESETTVNISIYAIILGGLCRNNCVDEAIVLFEKLGAMNVKLDVGIFNTMINAMYAVKGREEAKDLFAAISANGLVPNASSYGVMITNLLRED

SEQ ID NO: 1098 - protein, 360 aa, Triticum aestivum
MSRRFVPVDRRILERNIKARYHAGDIGTQDALHLFDELIQVAGPSSVRAINCLLTVVGRDCPALGVSLFNRVARTKVPPHNVTYGILVDCCCRAGRLDLGHAAMGRVIKLGFTAEAIVNFSHLLKAICAEKKTSYAMDIVLRIMPEFNCMPNIFSYNILFKGLCNEKRSQEALDLIQIMVEDGGCCRPDVVTYSTVIDGLLKEGEVGKAYRLFSEMLQRGISPNAVTYSSIICGMCRLHLMDKAEEVLQQMFDREILPDVATYTSLIHGYYSLGQCEEVDRIFKEMSRNGVQPDIVTYNIQMDYLCKNGRCAEARKIFDSMVSLGQKPTVTTYSILLHGYAIERFLIPCPGVDPLVGQLG

SEQ ID NO: 1099 - protein, 342 aa, Triticum aestivum
MSRIHLHRCLYSSTSRPLRSWSPRAAFAAATERVRAGALSQDDAHHLFDELLRQATPVPGRSLNGFLAALARAPASEVCRDGPALALALFNRVCRDEAGAPLTVHTYGILMGCCCRGHRPDLGLALFGRLHRTGIKTNQIAVNTFLKCLCYAKRTDEAVNVLLHRMSELGCVPNAFSYSIVLKSLCYNSMSQRALDLLQMMAKEGGACSPNVVTYTTVIHGLFKEGETGKACNLFHEMKQQGIEPNVVTYTSSIDALCKARAMDKAELVLRQMVANGAQPNEVTYNCMIHGYSTSGQLKEAAKMFREMTSQGLIPDNFTCSSLMTSLCKHQRSKEAAEIFMP

SEQ ID NO: 1100 - protein, 374 aa, Triticum aestivum
MGRMDAALDKFNQMVNQGVSPNKAVYQCLVLGSCSHGHFVKAKELISEAVNRGLCSNSVFFYPVINDLCKEGKVKEAQDMFDFIVGIGQRPDVIMYNSLMDGYCLVGKVEEALRVLDAMKSAGLQPTAVTYGILLNGYCKIGRIAAGLSLFMEMSLSGVKPTTIMYNIILDGLFRSGRTDSAKEKFRTMSESGIPVGIDTYNIVLSGLCKNNCAGEAIELFKKLRAMNVKIDVKTLTIMISAMFKSRRIEEAKELFATISAIGLVPSVVTYSVMMTNFIKEGSLAETDDMFLAMEKASCAPDSILLNQVVRALLEKGAVVKAATYLAKLDAKQLSVEASTISLIVSLFSGEGKLREHVELLPVKYQPPESSTDN

SEQ ID NO: 1101 - protein, 295 aa, Triticum aestivum
MFDFIVGIGQRPDVIMYNSLMDGYCLVGKVEEALRVLDAMKSAGLQPTAVTYGILLNGYCKIGRIAAGLSLFMEMSLSGVKPTTIMYNIILDGLFRSGRTDSAKEKFRTMSESGIPVGIDTYNIVLSGLCKNNCAGEAIELFKKLRAMNVKIDVKTLTIMISAMFKSRRIEEAKELFATISAIGLVPSVVTYSVMMTNFIKEGSLAETDDMFLAMEKASCAPDSILLNQVVRALLEKGAVVKAATYLAKLDAKQLSVEASTISLIVSLFSGEGKLREHVELLPVKYQPPESSTDN

SEQ ID NO: 1102 - protein, 374 aa, Triticum aestivum; identical to SEQ ID NO: 1100

SEQ ID NO: 1103 - protein, 370 aa, Triticum aestivum
MISLGVVPNAIMWNSFMDSLCKHRRTKEARDIFDSMAAKGQKPDIFSYSTMLNGYAKEGCFDDMTCLLNLMLQNGVVPNHHIFNILINAYAKPGLMDEAMHMFEVMRQQGVNPDVFDYQIIMDSLYKMGRMDATLDKFNQMVNQGVSPNKAVYQCLVLGSCFHGHFLKAKELISEAVNRGMCSNSMFFYPVINDLCKGKVEEAQDIFDFILGIGQRPDVTMYNSLMDGYCLVGKVEEALRVLDAMKSAGLQPDAITYAILLNGYCKIGKITDGLSLFREMSLSGVKPTTIMYNIILDGLFCSGRTVSAKEKFNTMVESGLPVDVCTYNIVLCGLYKNNCTGEAIELFKKLRAINMKIDVIILNTIISLIF

SEQ ID NO: 1104 - protein, 351 aa, Triticum aestivum
MEKSFHDMHCLIDLMVENGIAPDHHVYNILISACAQEEMVSDVMHIFTKMRQQGLNPNVANYGVVVNLLCSMGRMDDAMYQYNQMITEGLDPDIIVFSTLISGFCSCGAWERVHEIFSEMLNRGIYPDTVFFNIIMDHLCKEGRVMEAQDIFDLMVHMGVKPFVRDYNTLIHGYCLVGKMDEGRKLLDNMCSIGLKPDDFTYSILIDGYSMKGRIDDALIVVRELLDGKVGPSIITFNIMIVALLKGGRKEEAKDLFDGIWAKGLVPDVVTYSLMIQKLIEEGSLQESDDLFLSMEKNGCAADSRMLNDIVRSLLQKGTMQVSMEYATEASLARLPFKIYHALREATKMPS

SEQ ID NO: 1105 - protein, 225 aa, Triticum aestivum
MMSKGIPRPNIVFFNSVINYLCKEGRVMDAQDIFEFIISIDERPDVITFNSLIDGYCLVSKMDKASGVLDAMVSAGIEPNVVTYNTLVSGYSINRRIDDGLTLFRQMPLKRIKPDSVTYGIILDGFFRAGRTVAARKMFHEMIERGIPVTISIYNRILGGLCRNNCADEAIALFQKLGAMNVKFDIITLNTMINACSRFEEEKKLTICLLQYQPVGWCLMLLLTA

SEQ ID NO: 1106 - protein, 325 aa, Triticum aestivum
MMSKGIPRPNIVFFNSVINYLCKEGRVMDAQDIFEFIISIDERPDVITFNSLIDGYCLVSKMDKASGVLDAMVSAGIEPNVVTYNTLVSGYSINRRIDDGLTLFRQMPLKRIKPDSVTYGIILDGFFRAGRTVAARKMFHEMIERGIPVTISIYNRILGDLCRNNCADEAIALFQKLGAMNVKFDIITLNTMINAMFKVRRREEANDLFAAISASGLVPNASTYGIMIKNILKEGSVEEIDNMFSSMEKSGIVPSSHLINDIIRMLLEKGEIARAGYYLLKVDGKNTLLEASTTSLMLSLFSREGKYQEDVKLLPAKYQFFYGFG

SEQ ID NO: 1107 - protein, 325 aa, Triticum aestivum; identical to SEQ ID NO: 1106

SEQ ID NO: 1108 - protein, 225 aa, Triticum aestivum; identical to SEQ ID NO: 1105

SEQ ID NO: 1109 - protein, 325 aa, Triticum aestivum; identical to SEQ ID NO: 1106

SEQ ID NO: 1110 - protein, 325 aa, Triticum aestivum; identical to SEQ ID NO: 1106

SEQ ID NO: 1111 - protein, 358 aa, Triticum aestivum
MIMVFHQIIMATTYSYLLMLKKKMVDDVLHIFTKMRQQGLNPDVANYGAVINLLSSIGRMDDAMSQYNQMINEGLAPDIIVFNSLISGFCSCGKWEKVHELFSEMLDRGICPNTVFFTTIMDRLCKNGRVMEAQDLFDLMVHMGVKPDVWTYNTLIGGYLFIGKMDEVSKLLDNMCSIGLKPNVFTYGILIDGYSKNGSIDDALVVIREMLDGVKPSIITFNIMIGVLLKGSRMEEAKDLFDGIWAKGLVPDVVTYSLMIQKLIEEGSLQESDDLFVSMEKNGCAADSCMLNAIVRRLLQKGEILMAGTYLSKIDERRFSFEASTASLLAALVSGGKGQEYKELLPEKYHYFLEQGTD

SEQ ID NO: 1112 - protein, 358 aa, Triticum aestivum; identical to SEQ ID NO: 1111

SEQ ID NO: 1113 - protein, 344 aa, Triticum aestivum
MAKGDDCSPCVLSYSTVIHGFFKEGEVGMACNLFHEMTQQGVVPNVVTYNSIIDAMCKAGAMDKTELVLRQMVDNGVRPDKVIYNSMIHGYSTLGRWKEAGKMFREMTSRGLIPDIFTWNSFMGSLCKHGRSKEAAEIFFSMAAKGYKTNIVSYIALLRVYANEGSFADMMSLFNSMEGNGIVANCQVFTILIDAYAKQGMIDEAMLILTDMRGQGLSPDVFTYSTLISALCRMGRLADAMDKFSQMIGMGVQPNTVVYHSLVQGLCTHGDLAKAEELVSEMMNKGIARPNKSLASSFLYHYSISGSIRRVGANPAYIRVSICQHISVCDNPAETIRCSCHPSF

SEQ ID NO: 1114 - protein, 325 aa, Triticum aestivum
MMNKGIPRPSIVFFNSVINSLCKEGRIMDAHDIFDLVIDIGERPDAITFSSLIDGYCLVGNMDKALKVLDVMESVGVEPNVITYNTLVNGYCRNGRIDDSLTLFREMPRKRIKPDTVSYCIIMNGLFRAGRTVAARKMFHEMTENGITVSISTYSIILRGLCRNNCADEAITLFQKLGTMNVKFDIAILNTMINAMYKVGRREEAKDLFAAISHSGLVPNESTYKVMIKNLLKDGAVEDADNMFSSMDNSGIVPSSLLINDIIRMLLEKGEIAKAGNYLSKVDGKSISLEASTASLMLSLFSRKGKHQEDIKLLPAKYQFFDGFG

SEQ ID NO: 1115 - protein, 325 aa, Triticum aestivum; identical to SEQ ID NO: 1114

SEQ ID NO: 1116 - protein, 325 aa, Triticum aestivum; identical to SEQ ID NO: 1114

SEQ ID NO: 1117 - protein, 325 aa, Triticum aestivum; identical to SEQ ID NO: 1114

SEQ ID NO: 1118 - protein, 325 aa, Triticum aestivum; identical to SEQ ID NO: 1114

SEQ ID NO: 1119 - protein, 325 aa, Triticum aestivum; identical to SEQ ID NO: 1114

SEQ ID NO: 1120 - protein, 253 aa, Triticum aestivum
MIIVHMVIVHMVKKTLIQGYCTHGDLVKAMGLVSEMINRGIPPPDIVFFNSVINSLCKEGRVTDAQDTFDLVIYFGERPDIFTFNSLIDGYCLVGEMEKAFGVLDTMASGGIEPDSISYNTIVNGYFKNDRIDDGLALFREMLKKVKPTTVTYNIILDGLFGAGKTVAAKKTFHEMIESGITVSISTYRIILGGLCRNSCDDEAITLFQKLGAMNVKLDITILNTMINALFKVQRREEANNLFATVSASVDCF

SEQ ID NO: 1121 - protein, 330 aa, Triticum aestivum
MRLVSEMINRGIPPPDIVFFNSVINSLCKEGRVTDAQDIFDLVTYFGERPDIFTFNSLIDGYCLVGEMEKAFGVLDTMASGGIEPDSISYNTIVNGYFKNDRIDDGLALFREMLKKVKPTTVTYNIILDGLFGAGKTVAAKKTFHEMIESGITVSISTYRIILGGLCRNSCDDEAITLFQKLGAMNVKLDITILNTMINALFKVQRREEANNLFAAVSASGLVPNAYTYCIMITNLIKEGSVEEAENMFLLMEKSSCAPDSRLINCIIRILLEKGEIVKAGNYMSKVDGKSISLEASTTSLLIHLFASKGKYQEQINLLPVKYRFFEGVS

SEQ ID NO: 1122 - protein, 330 aa, Triticum aestivum; identical to SEQ ID NO: 1121

SEQ ID NO: 1123 - protein, 330 aa, Triticum aestivum; identical to SEQ ID NO: 1121

SEQ ID NO: 1124 - protein, 253 aa, Triticum aestivum; identical to SEQ ID NO: 1120

SEQ ID NO: 1125 - protein, 330 aa, Triticum aestivum; identical to SEQ ID NO: 1121

SEQ ID NO: 1126 - protein, 324 aa, Triticum aestivum
MMNRGIPRPNIVFNSVINSLCKEGRVMDAHDVLDLVIGIGERPNVITFNSLIDGYCLVGNMDKAFKILDVMESVGVEPNVVTYSALLDGYSKNRRIDDALTLFREMPRKRIKPDTVTYGIMLDGLFRAGRTVAAMEMFHEMTESGTTVDIVIYNIILGGLCRNNCVDEAIALFQKLRAMNVKFNIEILNTMINAMYKVQRKEEAKELFATISANGLVPNESTYAVMIRNLLRGGAVEDADNMFSSMDNSGIVPSSGLINDIIRMLLKKGEIAKAGNYLSKVDGKSISLEASTTALLLSLFSRKGKHQVDIKLLPAKYQFFDGFG

SEQ ID NO: 1127 - protein, 346 aa, Triticum aestivum
MPRLQVRSFCSSFSSRAYDLLNELQGHLDSRTLRPELARQLFDEMLRQPVPVTARALNGLFAALARAPPSTACTDGPALAVDLFNHMARAGRRRMTGPTVHTYNILIDCCHRACRPDLGPAFFGCLLKTGITMSAITYSSLFKFLCDMRRTKEALNVLLHRMPDDLPNVISYSVILKSFCDSGRSQLALDLLRVMAKKGGDHSPDVMAYNMVMDGLFKEGEVSKACDLFHEMIQQGVVPNEVTYSSIINALCKARAMDKAEVILRHMVRNGVQPHDSRIYNTLIHGFLTSDQLKEAFRLLKVMRSHGSMPNVVTCTSVMDYLCKHGRIKEAEEIFYSMAVNGRNQI

SEQ ID NO: 1128 - protein, 345 aa, Triticum aestivum
MPRLQVRSFCSSFSSRAYDLLNELQGHLDSRTLRPELARQLFDEMLRQPVPVTARALNGLFAALARAPPSTACTDGPALAVDLFNHMARAGRRRMTGPTVHTYNILIDCCHRACRPDLGPAFFGCLLKTGITMSAITYSSLFKFLCDMRRTKEALNVLLHRMPDDLPNVISYSVILKSFCDSGRSQLALDLLRVMAKKGGDHSPDVMAYNMVMDGLFKEGEVSKACDLFHEMIQQGVVPNEVTYSSIINALCKARAMDKAEVILRHMVRNGVQPHDRIYNTLIHGFLTSDQLKEAFRLLKVMRSQGSMPNVVTCTSVMDYLCKHGRIKEAEEIFYSMAVNGRNQI

SEQ ID NO: 1129 - protein, 345 aa, Triticum aestivum
MPRLQVRSFCSSFSSRAYDLLNELQGHLDSRTLRPELARQLFDEMLRQPVPVSARALNGLFAALARAPPSTACTDGPALAVDLFNHMARAGRRRMTGPTVHTYNILIDCCHRACRPDLGPAFFGCLLKTGITMSAITYSSLFKFLCDMRRTKEALNVLLHRMPDDLPNVISYSVILKSFCDSGRSQLALDLLRVMAKKGGDHSPDVMAYNMVMDGLFKEGEVSKACDLFHEMIQQGVVPNEVTYSSIINALCKARAMDKAEVILRHMVRNGVQPHDRIYNTLIHGFLTSDQLKEAFRLLKVMRSQGSMPNVVTCTSVMDYLCKHGRIKEAEEIFYSMAVNGRNQI

SEQ ID NO: 1130 - protein, 345 aa, Triticum aestivum; identical to SEQ ID NO: 1128

SEQ ID NO: 1131 - protein, 345 aa, Triticum aestivum; identical to SEQ ID NO: 1129

SEQ ID NO: 1132 - protein, 301 aa, Triticum aestivum
MLRQPVPVSARALNGLFAALARAPPSTACTDGPALAVDLFNHMARAGRRRMTGPTVHTYNILIDCCHRACRPDLGPAFFGCLLKTGITMSAITYSSLFKFLCDMRRTKEALNVLLHRMPDDLPNVISYSVILKSFCDSGRSQLALDLLRVMAKKGGDHSPDVMAYNMVMDGLFKEGEVSKACDLFHEMIQQGVVPNEVTYSSIINALCKARAMDKAEVILRHMVRNGVQPHDRIYNTLIHGFLTSDQLKEAFRLLKVMRSQGSMPNVVTCTSVMDYLCKHGRIKEAEEIFYSMAVNGRNQI

SEQ ID NO: 1133 - protein, 345 aa, Triticum aestivum; identical to SEQ ID NO: 1129

SEQ ID NO: 1134 - protein, 346 aa, Triticum aestivum
MPRLQVRSFCSSFSSRAYDLLNELQGHLDSRTLRPELARQLFDEMLRQPVPVSARALNGLFAALARAPPSTACTDGPALAVDLFNHMARAGRRRMTGPTVHTYNILIDCCHRACRPDLGPAFFGCLLKTGITMSAITYSSLFKFLCDMRRTKEALNVLLHRMPDDLPNVISYSVILKSFCDSGRSQLALDLLRVMAKKGGDHSPDVMAYNMVMDGLFKEGEVSKACDLFHEMIQQGVVPNEVTYSSIINALCKARAMDKAEVILRHMVRNGVQPHDSRIYNTLIHGFLTSDQLKEAFRLLKVMRSHGSMPNVVTCTSVMDYLCKHGRIKEAEEIFYSMAVNGRNQI

SEQ ID NO: 1135 - protein, 346 aa, Triticum aestivum; identical to SEQ ID NO: 1134

SEQ ID NO: 1136 - protein, 213 aa, Triticum aestivum
MSAITYSSLFKFLCDMRRTKEALNVLLHRMPDDLPNVISYSVILKSFCDSGRSQLALDLLRVMAKKGGDHSPDVMAYNMVMDGLFKEGEVSKACDLFHEMIQQGVVPNEVTYSSIINALCKARAMDKAEVILRHMVRNGVQPHDRIYNTLIHGFLTSDQLKEAFRLLKVMRSQGSMPNVVTCTSVMDYLCKHGRIKEAEEIFYSMAVNGRNQI

SEQ ID NO: 1137 - protein, 345 aa, Triticum aestivum; identical to SEQ ID NO: 1128

SEQ ID NO: 1138 - protein, 345 aa, Triticum aestivum; identical to SEQ ID NO: 1129

SEQ ID NO: 1139 - protein, 346 aa, Triticum aestivum; identical to SEQ ID NO: 1134

SEQ ID NO: 1140 - protein, 325 aa, Triticum aestivum
MMNKGIPRPDIAFFTSIINSLCKEGRVMDAQNIFDLLVAIDERPNVITFNSLIDGYCLVGEMDKVFRVLDAMKSVGAEPDIVTYNTLVNGYCRNGRIDDDLALFREMPCKGIKPDTVAYCIILDGLFHAGRIVVARKMFHEMIESGTTVGIPIYNITLKGLSRNNCAHEAIAMFQKLGAMNVKFDIVTLNTMINALYKVGKKEEAKDLFAAISASGLVPNASTYSIMIINYLKEGSVEDANNIFSSMEKSGIAPSSRLINYIIRIYLEKGEIAKAGDYLSKVDGKNILLEASTTSLMLSLFSRNGKYQENIKLLPAKYQFFYGFG

SEQ ID NO: 1141 - protein, 325 aa, Triticum aestivum; identical to SEQ ID NO: 1140

SEQ ID NO: 1142 - protein, 325 aa, Triticum aestivum
MMNKGIPRPDIAFFTSIINSLCKEGRVMDAQNIFDLLVAIDERPNVITFNSLIDGYCLVGEMDKVFRVLDAMKSVGAEPDIVTYNTLVNGYCRNGRIDDDLALFREMPCKGIKPDTVAYCIILDGLFHAGRIVVARKMFHEMIESGTTVGIPIYNITLKGLSRNNCAHEAIAMFQKLGAMNVKFDIVTLNTMINALYKVGRKEEAKDLFAAISASGLVPNASTYSIMIINYLKEGSVEDANNIFSSMEKSGIAPSSRLINYIIRIYLEKGEIAKAGDYLSKVDGKNILLEASTTSLMLSLFSRNGKYQENIKLLPAKYQFFYGFG

SEQ ID NO: 1143 - protein, 325 aa, Triticum aestivum
MMNKGIPRPDIAFFTSIINSLCKEGRVMDAQNIFDLLVAIDERPNVITFNSLIDGYCLVGEMDKVFRVLDAMKSVGAEPDIVTYNTLVNGYCRNGRIDDDLALFREMPCKGIKPDTVAYCIILDGLFHAGRIVVARKMFHEMIESGTTVGIPIYNITLKGLSRNNCAHEAIAMFQKLGAMNVKFDIVTLNTMINALYKVGKKEEAKDLFAAISASGLVPNASTYSIMIINYLKEGSVEDANNIFSSMEKSGIAPSSRLINYIIRIYLERGEIAKAGDYLSKVDGKNILLEASTTSLMLSLFSRNGKYQENIKLLPAKYQFFYGFG

SEQ ID NO: 1144 - protein, 325 aa, Triticum aestivum; identical to SEQ ID NO: 1140

SEQ ID NO: 1145 - protein, 325 aa, Triticum aestivum; identical to SEQ ID NO: 1140

SEQ ID NO: 1146 - protein, 325 aa, Triticum aestivum; identical to SEQ ID NO: 1140

SEQ ID NO: 1147 - protein, 284 aa, Triticum aestivum
MHSNEALDLLLHRMPELDCAPDVFSFNIVINGCFREGEVDKACNLFHEMPQLGVQPDVVTYNSIIIALSRAGAMGKAEVVLRQMVDKGIGPDVMTYNSLIHGYSTLGQWKAAVRVFKEMVSVGVLPNAVTLNSFMDSLCKHRRTKEARDIFDSMAAKGHKPNIASYSTMLNGYAKQGCFDDMTGLFNSMLQNGVVPNHHIFNILINAYAKRGLMDEAMHMFEVMRQQGVNPDVFSYQIVMDSLCKWVGWMLLWTNLIRWSIKEFHLTKLFTNAWFWVLVLMVIL

SEQ ID NO: 1148 - protein, 328 aa, Triticum aestivum
MMNKGIPRPDIMFFHSIMQNLCTEGRVVEARDILGLIAHIGMRPNVCTFNILIGGYCLVRKMEDASKIFHDMMPYGLEPSNITYGILINGYCKNLRIDDGLILFKEMLRKGLKPTTLNYNIILDGLFLAGRTAAAKEKFDEMVESGADVCIDTYCIVLGGLCRNNCYSEAIMLFQKLSAMNVKFDITVVNIIIGAFYRVQRNQEAKDLFVAIPANGLVPNSVTYTIMMRNLIKEGSVEEADNLFLSMENSGCTANSNMLNLIVRMLLEKGEIVKAGNYMSKVDAKSYSLEAKTVSLLISLFSGKGKYREHIGLLPTKYQFREEAATVV

SEQ ID NO: 1149 - protein, 280 aa, Triticum aestivum
MPAARLSSFKAPSRERRPPLAALAAATERVRAGTLSRQDAHHLFDELLSQAATVPVRKLNNFLAALARAPPSAACSDGPGLAIALFNRMSRGAGARVVSPTLCTYSILMDCCCRARRPDLVVAFFGRLLRLGLRLEVISFSNLLKGLCQAKRTNEAVDLLLHRTPELDCVPDVVSYNIVINGCLKEGEVDKACNLFHEMPQLGVQPDVVTYNSIIDALSKSRAMDKAEVVLRQMVDQGIGPDVMTYTSLIHGYSTSGQWKEAVRLFKKMTSLGALPYRHV

SEQ ID NO: 1150 - protein, 330 aa, Triticum aestivum
MPDDLPNAISYSVILKSFCDSGRSQLALDLLQMMAKKGADHSPDVVAYNMVIDGFFKEGEVSKACDLFHEMIQQGVVPTVVTYNSVIDALCKARAMDKAEVVLRSMVHNGVHPNTVTYNSLIQGYSTLGQLKEVARLLKVMRSQGVMPSVVTYNSLMDYLCKHGRIKEAEEIFYSMAVNGRRPDIVSYSIMLHGYAIEGSLVEMIDLCELMARDGVVPDLRCFNILINAYAKYGRMDVAMLFFEDMLKQGVKPNEFTYLTVISAFCKMGRMDDAMEKFSEMIDIGVPLDTEVYMCMVEGYFNHGDSMKAEEFITRMKNKDINHKPWEGNR

SEQ ID NO: 1151 - protein, 330 aa, Triticum aestivum; identical to SEQ ID NO: 1150

SEQ ID NO: 1152 - protein, 330 aa, Triticum aestivum; identical to SEQ ID NO: 1150

SEQ ID NO: 1153 - protein, 330 aa, Triticum aestivum; identical to SEQ ID NO: 1150

SEQ ID NO: 1154 - protein, 250 aa, Triticum aestivum
MPAARLSSISTSSFRAPSRAPLAALAAATERVRAGTLSQDDAHHLFDQLLGQAAAVPERGLNNFLAALARAPPSAACRDGPGLAIALFNRMSRGAGARVASPTLCTYSILMDCCCRAGRPDLVLAFFGRLLRLGLRLDIISSSNLLKGLCQAKRSNEALDMLLHRMPELDCVPDVFSYSIVINGCFKQGEVDKACNLFHQMPQLGVQPNVVIYNSVIDALSKSGAMDKAEVVLGKWLIKELNPISRHITV

SEQ ID NO: 1155 - protein, 250 aa, Triticum aestivum; identical to SEQ ID NO: 1154

SEQ ID NO: 1156 - protein, 324 aa, Triticum aestivum
MLQRGISPNVVTCNSIISGMCKVHAMDKAEEVLQQMTDRGILPDVATYTSLIHGYYSLGQCKEVDRIFKEMTRNGVQPNVVTYSIQMDYLCKSGRCAEARKIFDSMVSLGQKPSVTTYSILLHGYVMEKSFHDMHCLLDFMVENGISPDHHVYNILISAYAKEEMASEVMHIFTKMRQQGLNPSVADYGAVINLLSSIGRMDDAMSQFNQMIAEGLAPDIIVFNPLISGFCTCGKWEKVHELFSEMLNRGTYHDTVFFTTIMDRLCKNGRVMESQDMFDLMVHVGVKPNVHTYATLMHGYFFVRKMDEVRKLVGNMLSIGSKPD

SEQ ID NO: 1157 - protein, 282 aa, Triticum aestivum
MALPSPRMAQAGRRQVPAPSIYTYNILIDCCHRACRPDLGPAFFGRLLNTGITMSVITYISLFKCLCDMKRTEEALNVLLHRMPDDLPNVISYSVILKSFCDSGRSQLALDLLQMMAKKGADHSPDAMSYNIVIDGFFKEGEVSKACDLFHEMMQQGVVPDMATYNSVIDALCKARAMDKAEVVLRSMVHNGVQPDVVTYNSLIQGYSTLGQLKEVARLLKVMRSQGVMPSVVTYNSLMDYLCKHGRIKEAEEILDSMAVNGRKPDLILYYAPWVRYRRIPC

SEQ ID NO: 1158 - protein, 282 aa, Triticum aestivum; identical to SEQ ID NO: 1157

SEQ ID NO: 1159 - protein, 282 aa, Triticum aestivum; identical to SEQ ID NO: 1157

SEQ ID NO: 1160 - protein, 282 aa, Triticum aestivum; identical to SEQ ID NO: 1157

SEQ ID NO: 1161 - protein, 282 aa, Triticum aestivum; identical to SEQ ID NO: 1157

SEQ ID NO: 1162 - protein, 282 aa, Triticum aestivum; identical to SEQ ID NO: 1157

SEQ ID NO: 1163 - protein, 254 aa, Triticum aestivum
MPRLRLRRFSTAPMFHLLRRSSSSTTTSPPSRSWSPHAAFAAATERISAGTLSREDAHRLFDELLRQATPVPSRSLNGFLAALARATSSAACIRDGRALAIALFNRVCREQSGPRVVPLTVHTYNILMDCCCRASRPDLGLAFFARLLRTGLKTNEITANTFLKCLCYAKRTDEALNVLLHRMSELGCVPDAISYNIVLKSLCEDSMSQRALDLLQMMAKEGGGCSPNVVAYNTVIHGFFKEGETGKDAICSMK

SEQ ID NO: 1164 - protein, 254 aa, Triticum aestivum; identical to SEQ ID NO: 1163

SEQ ID NO: 1165 - protein, 254 aa, Triticum aestivum; identical to SEQ ID NO: 1163

SEQ ID NO: 1166 - protein, 325 aa, Triticum aestivum
MRQQGLNPNVVNYGAVINLLSSIGRMDDAMSQFNQMITEGLAPDIIVFNSLISGFCSCGKWEKVHELFSEMLDRGICPDRVFFNTVMDHLCKNGRVMEAQDVFDLMVHMGVKPFVRDYNTLIHGYCLVGKMDEGRKLLDNMFSIGLKPGDFTYSILIDGYSKKGRIDDALIIVRVMLDGKVKPSIITFNIMIGALLKGGRKEEAKDLFNGIWAKGLVPDVVTYSLMIQKLIEEGSLQESDDLFLSMEKNGCAADSRMLNAIVRSLLQKGDVPRAGTYLSKIDERSFTLEGSTASLLTALASGRKGQEYKGLLPEKYHYFLEQGTD

SEQ ID NO: 1167 - protein, 319 aa, Triticum aestivum
MPRFSSTTSMSPLRLRLRLHARHSSASQPSRSQGWDPHAAFAAATQRARSGSLTPADAHHLFDELLRQANPVQERPLNNLLAAIVRAPASNACRNGPALAVALFSRISQGARRRVAQPNVFTYGVLMDCCCRARRLDLAIAFFGRLLKTGLEADLVFFSTLLKGLCHAKRSDEALDVLLHRMPELGCTPDVVVYNTVIHGFFREGQVGKACDMFHGMAQQGVAPNVVTYNSVIDALCKARAMDKAEYFLRQMVDNGVVPDNVTYNSLIHGYSSSGHQKETLRVLKEMTSQGIIPDVVTCNSLMAYLCKNGRSKEAAEFF

SEQ ID NO: 1168 - protein, 321 aa, Triticum aestivum
MPRRLPLALLPLHTKAMPRLSSTTPMSPLRLRLRARHSSSTSHSSRSWEPHTAFAAATERARSGNLTPEDAHHLFDELLRQANPVQERPLNNLLAALARAPASAACSDGLALAVNLFSRISQGARCVAHPTACTYGILMDCCCRAHRLDLAFAFFGRLLRTGLKAGVIQVCTLLKGLCHAKRTDEALNVLLHRMTELGCTPDVVAYNTVIHGFFKEGQVGKACSLFHEMAQQGVAPNLMTYTSVIDALCKAKAMDKAEYFLRQMVDNGVVPDNVTYNSLIHGYSSSGHWKEAVRVSKEMTSRRVTADVHTYNMFMTFLCKH

SEQ ID NO: 1169 - protein, 321 aa, Triticum aestivum; identical to SEQ ID NO: 1168

SEQ ID NO: 1170 - protein, 321 aa, Triticum aestivum; identical to SEQ ID NO: 1168

SEQ ID NO: 1171 - protein, 321 aa, Triticum aestivum; identical to SEQ ID NO: 1168

SEQ ID NO: 1172 - protein, 321 aa, Triticum aestivum; identical to SEQ ID NO: 1168

SEQ ID NO: 1173 - protein, 321 aa, Triticum aestivum; identical to SEQ ID NO: 1168

SEQ ID NO: 1174 - protein, 212 aa, Triticum aestivum
MDSCCRARRPDLGLAFFGRFLRTGLKADLIVASTLLKCLCHVRRTNEAVNMLLHRMSEFGCVPDAISYSIVLKSLCDNSRSQQALDLLQMVRKERGASSLNVVAYSIIIHGFFKEGEVSKACDLFHEMMQQGIVPDVVKYRSVIDALCKVRAMDKAKLVLQQMVNNGVRPNMYTWNSFMYSLCKHGRSKEAAEFFDSMVETARVLPGLGRSL

SEQ ID NO: 1175 - protein, 311 aa, Triticum aestivum
MKFSAVPSLVECLTSAGHPVSSGLSSPTRSHIRHCRKEQDLPRLTRSSSSSGSSRVNQLLNKLKDYLGSGTLRPELAHQLFVELFRQTVPVSADALNVLFSALACGLPSAACNDGPALAIALFKHMARARCRQVMAPTNHTYNTLIECCHMARRPDIGLVFFGLLLKIGITADVFTFNSLLKCLCDMKQTDEALGVLLHRMPGDMPDVISYSVIIKSFCDNGRSHRALDLLRMMTKKGYDHSPNVVSYTIIIDGLIKEGELSKACALFHEMMQQGVVPDVVTYSSIIDGLCKARALDEAEVVLRQMIDSGV

SEQ ID NO: 1176 - protein, 311 aa, Triticum aestivum; identical to SEQ ID NO: 1175

SEQ ID NO: 1177 - protein, 311 aa, Triticum aestivum; identical to SEQ ID NO: 1175

SEQ ID NO: 1178 - protein, 311 aa, Triticum aestivum; identical to SEQ ID NO: 1175

SEQ ID NO: 1179 - protein, 311 aa, Triticum aestivum; identical to SEQ ID NO: 1175

SEQ ID NO: 1180 - protein, 311 aa, Triticum aestivum; identical to SEQ ID NO: 1175

SEQ ID NO: 1181 - protein, 268 aa, Triticum aestivum
MRPCRTPLLDSTSPLSVLLLDHLHRNRPSPPPSASPPSAIWSPIAAFAAATKRARAGTLSPEDAHHLFDELLRQSIPVPNRFLNGFLAALARAPVSEACGDGPALTVALFNRLCREEAGPCVEPPTYYTYSILMDSCCRVGRPDLGLAFFGRLLKSGLKADQITASSLLMCLCDAGRTNEAVDVLLHRISELGCEPNVIPYNIVLKSLCDSSRSQRALDLLQMMAQRACCSPNVVSYNTVIQGLFKEGQVSMARTFFFYEMMGLCLMW

SEQ ID NO: 1182 - protein, 268 aa, Triticum aestivum; identical to SEQ ID NO: 1181

SEQ ID NO: 1183 - protein, 268 aa, Triticum aestivum; identical to SEQ ID NO: 1181

SEQ ID NO: 1184 - protein, 268 aa, Triticum aestivum; identical to SEQ ID NO: 1181

SEQ ID NO: 1185 - protein, 268 aa, Triticum aestivum; identical to SEQ ID NO: 1181

SEQ ID NO: 1186 - protein, 268 aa, Triticum aestivum; identical to SEQ ID NO: 1181

SEQ ID NO: 1187 - protein, 321 aa, Triticum aestivum
MDYLCKSRRCAEARTIFDSMAGKDQKPNVTSYSILLHAYAMEQSFHDMHCLIELMVENGVAPNHSVYNILIDAYAKGKMVDDVMHIFTKMRQQGLNPNAVNYGTVINLLCSIGRMDDAMLQFNQMITEELVPDIIVFNTLISGFFSCGKWEKVHELLAEMLNRGIYPDNVFFNTIMDHLCKNGRVMESQDLADLMIHMGLKPDVHTYNTLMGGYFFIGKMDEVRKLLDHMVSIGMEPDVVTYNTLIDGYFKNGMIDDALAVFSEMLDKKVKPCVITYNTVLHGLFHTGRTVAANELYLRMIDSGICVDIVTYNNSAYVVST

SEQ ID NO: 1188 - protein, 321 aa, Triticum aestivum; identical to SEQ ID NO: 1187

SEQ ID NO: 1189 - protein, 321 aa, Triticum aestivum; identical to SEQ ID NO: 1187

SEQ ID NO: 1190 - protein, 321 aa, Triticum aestivum; identical to SEQ ID NO: 1187

SEQ ID NO: 1191 - protein, 321 aa, Triticum aestivum; identical to SEQ ID NO: 1187

SEQ ID NO: 1192 - protein, 321 aa, Triticum aestivum; identical to SEQ ID NO: 1187

SEQ ID NO: 1193 - protein, 303 aa, Triticum aestivum
MLRRIRIRIRLRRRPYPSCTYPEPVLCHSSSFISAAPLLRLHQYRTTTTPMSRIHLRRRLFSSTTRPSHSWSPHAAFAAATKRVRTGALSQDDAHHLFDELLRQATPVPGRSLNGFLAALARAPASGACRDGPALALALFNRVCRDESGARVAPPTIFTYGILMNCCCRAHRPDLGLAFLARLLRTGLKADQITATTFLKCLCYAKRTDEAVNVLLHRMPELGCVPDAFAYSTVLKSLCDNSMSQRGLDLLHMMAKEGGGCSPNVVACSTVIHGFFKEGETGKACNLFHEMMQQGVEPNVWTY

SEQ ID NO: 1194 - protein, 303 aa, Triticum aestivum; identical to SEQ ID NO: 1193

SEQ ID NO: 1195 - protein, 303 aa, Triticum aestivum; identical to SEQ ID NO: 1193

SEQ ID NO: 1196 - protein, 287 aa, Triticum aestivum
MLDRGICPDTVFFNTVMDHLCKNGRVMEAQDVFDLMVHMGVKPFVYDYNTLIHGYCLVCKMDEERKLLDNMFSIGLKPDDFTYSILIDDYSKKGRIDDALIIVREMLDGKVKPSIITFNIMIGVLLKGGIKEEAKDLFDGVWAKGLVPDVVTYRLMIQKLIEEGSLQESDDLFLSMEKNGCVADSHMLNATVRSLLQKGEVPMAGTYLSKIDERRFTFEAPTASLLTALASGGKARNIRSYSLKNTTLFWNRALVETISRDFAYIFWTAIRGLNFSLWVTSPNLLFS

SEQ ID NO: 1197 - protein, 287 aa, Triticum aestivum; identical to SEQ ID NO: 1196

SEQ ID NO: 1198 - protein, 287 aa, Triticum aestivum; identical to SEQ ID NO: 1196

SEQ ID NO: 1199 - protein, 293 aa, Triticum aestivum
MFDFIVGIGQRPDVIMYNSLMDGYCLVGKVEEALRVLDAMKSAGLQPDAFTYGILLNGYCKIGRIAAGLSLFMEMSLSRVKPTTIMYNIILDGLFRSGRTVSAKEKFRTMSESGIPVGIDTYNIVLNGLCKNNCTDEAIELFKKLRATNVKIDVITFSTMISAMFKTRRIEEAKDLFATISAIGLVPSVVTYSLMMTNFIKEGLLADADDMFLAMEKAGCAPDSRLLNQVVRVFLKNGEVVKAVTYLAKLDAKQLSVEASTISLIVSLFSRKGKLREHVKLLPVKYQPPEMLG

SEQ ID NO: 1200 - protein, 293 aa, Triticum aestivum; identical to SEQ ID NO: 1199

SEQ ID NO: 1201 - protein, 293 aa, Triticum aestivum; identical to SEQ ID NO: 1199

SEQ ID NO: 1202 - protein, 293 aa, Triticum aestivum; identical to SEQ ID NO: 1199

SEQ ID NO: 1203 - protein, 293 aa, Triticum aestivum; identical to SEQ ID NO: 1199

SEQ ID NO: 1204 - protein, 293 aa, Triticum aestivum; identical to SEQ ID NO: 1199

SEQ ID NO: 1205 - protein, 284 aa, Triticum aestivum
MHGDLVKVKELIFEMTDKGIPHPNIVFFSSIMHSLCNEGRVMDAHHIFDLVIDIGERPDLITFNTLIDRYCLVSKMEEALRLLDSMVSAGIKPNVITYNTLINGYRSGRLDDGVILFREMLHTRVKPNTVTYNIILDGLFRAGRTVSAKKMFHEMIETGTAVSISTYSIVLGGLCRNNCTDEAIAFFQKLVAMNVMFNIAILNTIIKAMYTVQRREEANDLFASLPAYGLVPNAATYGVMISNLLKEGSLEEADNMFSSMEKRGCAPSSRLVMISSENYWKRGR

SEQ ID NO: 1206 - protein, 289 aa, Triticum aestivum
MPRLSSTTTTPMSPLRLRLRLRARHSASTSHSSRSWEPHAAFAAAAERARSGNLTPEDAHDLFDELLRQGNPVQERPLNKLLSALARAPASAACRNGPALAVNLFSRISQGARLRVAQPTACTYGVLMDCCCRAHRLDLTLAFFGGLLRTGLEADQVIFCTLLKGLCHAKCTDEALNVLLHRMPELGCTPNVVAYNTVIHGFFREGQVGKACNLFHEMRQQGVTPDVVTYNSVIDVLCMLVDLGSDRVKSNVKGMSQEPTFVAFDPNRIALIGGTSNRQMVLVPYCQRI

SEQ ID NO: 1207 - protein, 289 aa, Triticum aestivum; identical to SEQ ID NO: 1206

SEQ ID NO: 1208 - protein, 300 aa, Triticum aestivum
MPNVVTYSLMVGGLCKVGARDKAKLVLRHMVGNSVRPDMYTWNSFMGSLRKQGRSKEATQLFDYMAAKGHKPDVVMYSTLLHGYATEGCFTDMINRFNSMEGNGIVANSRVFNILIDAYAKRGMMHEAMLIFTEMREQRVSPDTFTYGIIIAALCRMGRLSDAMEKLNEMVATGLQPDEAVYYSLIQGFCTHDDLVKAKELVSEMMTKGIPRPNIVFFNSVIARLCKEGRVKDAHGIFDLAMNIGERPNVITFNSLIHGYSLVGKMAKAFGVLDDMESVGIEPDVVTYTTLRHGYSRNRR

SEQ ID NO: 1209 - protein, 300 aa, Triticum aestivum; identical to SEQ ID NO: 1208

SEQ ID NO: 1210 - protein, 300 aa, Triticum aestivum; identical to SEQ ID NO: 1208

SEQ ID NO: 1211 - protein, 300 aa, Triticum aestivum; identical to SEQ ID NO: 1208

SEQ ID NO: 1212 - protein, 300 aa, Triticum aestivum; identical to SEQ ID NO: 1208

SEQ ID NO: 1213 - protein, 300 aa, Triticum aestivum; identical to SEQ ID NO: 1208

SEQ ID NO: 1214 - protein, 297 aa, Triticum aestivum
MMVEDGGSCQPSVVFYNIIVYVLLKEGAMGKAYNLFCEMLQTGISPDVVTYNSIIYGMCKVHAMDMAEEVLQQMFDRGILPNYRTYNSLIHGYYSLGQCGEVDQVLREMFGNGVQPNVVTYSVQTDYLCKSGRCTEARKIFDSMTGLGQKPTVTNYNILLHGYAMERSFHDMHCLIDLMVENGIVPHHHIYHILIFACSKEKMVDEAMHIFKKMRQQGLNPNAASYGTVINLLCNIGRMDDMMLQFNQMITEGLAPDIIVFNTLLIGFCSCGKWEKVYELFSEMLNRGIYPVMCSSR

SEQ ID NO: 1215 - protein, 288 aa, Triticum aestivum
MMDEAMLIFSGMCGQGVTPESRMARLADALNKFSQMISTDIQPNTVVYHSLIQGFCAYGDSVKAKELVYEMINNGFPRPNIVFFSSIINSLCKEGKVIDAQDIFNLVVEIGESPDVTIFTSLIEGFCLVGKMEKASQVFDSMVSVGIEPNIVTYGTLVDGYCRSGRIDDGLILFRDLLHKGVKPTTITYYIILDGLFLAGRTVAAKKMFHEMIGSGTPVSLHTYDIILGGLCRNNCADEAITLFQKLVAMNVKLDITIHNTMINAMFKVQRREKANDFCCSISQWIGT

SEQ ID NO: 1216 - protein, 244 aa, Triticum aestivum
MMDEAMLIFSGMCGQGVTPESRMARLADASNKFSQMISTDIQPNTVVYHSLIQGFCAYGDSVKAKELVYEMINNGFPRPNIVFFSSIINSLCKEGKVIDAQDIFNLVVEIGESTDVTIFTSLIKGYCLVGKMEKASRVFDSMVSVGIEPNIVTYGTLVDGYCRSGRIDDGLILFRDLLHKGVKPTTITYYIILDGLFHAGRIVAAKKMFHEMIGSGTPVSLHTYDIILGGLCRNNCADEAITLF

SEQ ID NO: 1217 - protein, 288 aa, Triticum aestivum; identical to SEQ ID NO: 1215

SEQ ID NO: 1218 - protein, 288 aa, Triticum aestivum; identical to SEQ ID NO: 1215

SEQ ID NO: 1219 - protein, 244 aa, Triticum aestivum; identical to SEQ ID NO: 1216

SEQ ID NO: 1220 - protein, 288 aa, Triticum aestivum; identical to SEQ ID NO: 1215

SEQ ID NO: 1221 - protein, 292 aa, Triticum aestivum
MSRLHPRYFSSSVSSLADELLSEFQHHLGSGTLSPQLAHQLFDGLLRQPVPVSARALNGLFAALARTPPSTTCADGPARAIDLFNRMARAGRRRRVIAPTSHTYSILIECCCLARRPDLGPSFFAHLLKTGVTADVVIFSGLFKCLCDMKRTEEALDVLLHRVPHDLPNVISYSVIVKSLCDNGRSQLALDLLHIMAKKGADHSPNVVSYNMVIDGFFKEGETSKACDLLQEMIQQGVVPDVVMYSSIIDALCKARAMDKAEVVLRQMVHDGDVTAARSFDESGDNYRFGGF

SEQ ID NO: 1222 - protein, 234 aa, Triticum aestivum
MDKAELILRHMVHSGVQPHDRIYNTLIHGFLTLGQQKEAFRLLELMTSQGVMPNVVTCNSVMDYLCKHGRVKEAAEIFYSMVVKGQKPNVISYSVMLHGYAKEGSLVAMIDLCELMARDGVVPDRSFFNILIKAYAKYGMIDVAMLFFDEMLKQGVNPNDITYLTLISAFCKMGRMDDAMIKFNEMIDMGIPHDTTVYMCMIEGYLNHGDSVKAKEFITKMKSRDVCHSPRKGN

SEQ ID NO: 1223 - protein, 280 aa, Triticum aestivum
MVMDGFFKEGEVSKACDLFHEMIQQGVVPTEVTYSSIINALCKARAMDKAELILRHMVHSGVQPHDRIYNTLIHGFLTSGQQKEAFRLLKLMTSQGVMPNVVTCNSVMDYLCKHGRVKEAAEIFYSMVVKGQKPNVISYSVMLHGYAKEGSLVAMIDLCELMARDGVVPDRSFFNILIKAYAKYGMIDVAMLFFDEMLKQGVNPNDITYLTLISAFCKMGRMDDAMIKFNEMIDMGIPHDTTVYMCMIEGYLNHGDSVKAKEFITKMKSRDVSHSPRKGN

SEQ ID NO: 1224 - protein, 234 aa, Triticum aestivum; identical to SEQ ID NO: 1222

SEQ ID NO: 1225 - protein, 234 aa, Triticum aestivum; identical to SEQ ID NO: 1222

SEQ ID NO: 1226 - protein, 280 aa, Triticum aestivum; identical to SEQ ID NO: 1223

SEQ ID NO: 1227 - protein, 234 aa, Triticum aestivum; identical to SEQ ID NO: 1222

SEQ ID NO: 1228 - protein, 226 aa, Triticum aestivum
MPPSPLPQSVSAGTLSPKHVHHLFDKLLRQATPVPERSLNGFLAALAHAPDSSACKDGPALVLAIFNRVSREEAGLRVATPAICTYCILMDCCCRARRRDLGLAFFGRLMRTGLKTNQIAANNLLKCLCHAKRTDEAVSVLLHRMSDLGCAPNCISYNTVLKSLCEDSRSQQALDLLQMMAKEGGVCSPSLVKYNTVIHGFFKEGQVSKACNLYHEMMSKGLCLMW

SEQ ID NO: 1229 - protein, 263 aa, Triticum aestivum
MPRRLYSTRPMSYTRLCRRLSSSSTTTSSSSPSWCPHAAFATATERVRAGTLSPEHVHHLFDKLLRQATPVPERSLNGFLAALAHAPDSSACKDGPALVLAIFNRVSREEAGLRVATPAICTYCILMDCCCRARRRDLGLAFFGRLVRTGLKTNQIAANNLLKCLCHAKRTDEAVSVLLHRMSDLGCAPNCILYNTVLKSLCEDSRSQQALDLLQMMAKEGGVCSPSLVKYNTVIHGFFKEGQVSKACNLYHEMMSKGLCLMW

SEQ ID NO: 1230 - protein, 263 aa, Triticum aestivum; identical to SEQ ID NO: 1229

SEQ ID NO: 1231 - protein, 226 aa, Triticum aestivum; identical to SEQ ID NO: 1228

SEQ ID NO: 1232 - protein, 226 aa, Triticum aestivum; identical to SEQ ID NO: 1228

SEQ ID NO: 1233 - protein, 184 aa, Triticum aestivum
MSRVCLCRRLSSTSTSNTPPSPSWSPQAAFAAATERARAGTLSPQDAHHLFDELFRQATPVPERSLDGFLAALGRAASSEACRDGPSLALTLFNRLCREEAGRRVAPPTIYTYGILMNCCCRVRRPDLGLAFFGRLLRTGLKTNEVVASTLLKCLCCAKRADEAVNVLLHRMSVAVCLIPSHTT

SEQ ID NO: 1234 - protein, 280 aa, Triticum aestivum
MIHGYSTLGRWKETGKMFREMTSRGIIPDVVSWTSFMTSLCKHGRSREATGIIDYMSAKGHKPNIVSYSILFHGYATEGCFDDMINLLDSMATNGIVPNRQIFSILVDAYAKRGMMDEAMLIFTGMWEQGVIPDVSRWGQGVSPESTIFRLADALNKFSQMISIDIKPDTVVYHSLIQGFCTHGDLVKAKELVYEMINKYIPPPTVVFFSSIINSLCKEGRVTDAQDIFNLVVEIGESPDVFAFTSLLDRYCLVGKMEKASQVLMQWYQLALSLMHPPKA

SEQ ID NO: 1235 - protein, 280 aa, Triticum aestivum; identical to SEQ ID NO: 1234

SEQ ID NO: 1236 - protein, 280 aa, Triticum aestivum; identical to SEQ ID NO: 1234

SEQ ID NO: 1237 - protein, 280 aa, Triticum aestivum; identical to SEQ ID NO: 1234

SEQ ID NO: 1238 - protein, 262 aa, Triticum aestivum
MLRPELAHQLFDEMLRQPVPVSARALSGLFAALARAPPSPVCTDSPALAIDLFNLMARAGRRQATTPTIYTYIILMECCHRACRPDLGIAFFGRLLKTGIPTNIITYSSLFKCLCDMKRTEEALNVLLHKMPDDLPNVISYSVILKSFCDNGRIQLALDLLQMMAKKGADHSPDVMSYNMVIDGFFKEGEVSKACNLFQEMIRQGIVPTEVTYSSIINALCKARAMDKAEVVLRSMVHNGAQPDVVTYNSLIQGYSTLGQLK

SEQ ID NO: 1239 - protein, 249 aa, Triticum aestivum
MLRQPVPVSARALSGLFAALARAPPSPVCTDSPALAIDLFNCMARAGRRQATAPTIYTYIILMECCHRACRPDLGLAFFGRLLKTGIPTNIITYNSLFKCLCDMKRTEEALNVLLHKMPDDLPNVISYSVILKSFCDNGRIQLALDLLQMMAKKGADHSPDVMSYNMVIDGFFNEGEVSKACNLFQEMIRQGIVPTEVTYSSIINALCKARAMDKAEVVLRSMVHNGAQPDVVTYNSLIQGYSTLGQLK

SEQ ID NO: 1240 - protein, 262 aa, Triticum aestivum; identical to SEQ ID NO: 1238

SEQ ID NO: 1241 - protein, 262 aa, Triticum aestivum; identical to SEQ ID NO: 1238

SEQ ID NO: 1242 - protein, 249 aa, Triticum aestivum; identical to SEQ ID NO: 1239

SEQ ID NO: 1243 - protein, 262 aa, Triticum aestivum; identical to SEQ ID NO: 1238

SEQ ID NO: 1244 - protein, 279 aa, Triticum aestivum
MDCCCRACRPDLALAFFGRLFRTGLEANQVIFCTLLKGLCHAKRTDEALDVLLHRMPELGCTPDVVAYNTVIHGFFREGQVGKACDLFHGMAQQGVMPDVVTYSSVIDALCKARAMDKAEYFLRQMIGNGVVPNNVAYNSLIHGYSSSGHWKEAVRVFKEMTSRRVTADVHTYNMFMTFLCKHGRSKEAAGIFDTMAMKGLKPDNVSYAILLHGYATEGCLVDMINLFNSMERDCILLDCCIFSILINAYAKSGKLDKAMLLFKEMQKQGVNLHSHIQP

SEQ ID NO: 1245 - protein, 279 aa, Triticum aestivum; identical to SEQ ID NO: 1244

SEQ ID NO: 1246 - protein, 279 aa, Triticum aestivum; identical to SEQ ID NO: 1244

SEQ ID NO: 1247 - protein, 279 aa, Triticum aestivum; identical to SEQ ID NO: 1244

SEQ ID NO: 1248 - protein, 279 aa, Triticum aestivum; identical to SEQ ID NO: 1244

SEQ ID NO: 1249 - protein, 279 aa, Triticum aestivum; identical to SEQ ID NO: 1244

SEQ ID NO: 1250 - protein, 274 aa, Triticum aestivum
MKQRGFVPDVGTYNSIIDAMCKARAMDKAKLVLRQMVDSGVRPDIVTYNKLIHGYSISGQFEEVVTLLEKMRSQGVKPTVFTCNTVMDYLCKHGRIKEAAEFFYSMVEKGHKPNIVSYAIMLHGYAKEGSLVEMTDLCELMARDGIVSYLHCFNILINAYAKCGMMDVAILFFKDMLKQGVNPDEVTYLAVIAGYCRVGMMDDAMEKFNEMIGMGVPHNATVYRCMIQGYLNHGDFLKAKELITEMKTKGIHPRLSKSQGIDPGYLMSQLFPGA

SEQ ID NO: 1251 - protein, 274 aa, Triticum aestivum; identical to SEQ ID NO: 1250

SEQ ID NO: 1252 - protein, 274 aa, Triticum aestivum; identical to SEQ ID NO: 1250

SEQ ID NO: 1253 - protein, 274 aa, Triticum aestivum; identical to SEQ ID NO: 1250

SEQ ID NO: 1254 - protein, 274 aa, Triticum aestivum; identical to SEQ ID NO: 1250

SEQ ID NO: 1255 - protein, 274 aa, Triticum aestivum; identical to SEQ ID NO: 1250

SEQ ID NO: 1256 - protein, 283 aa, Triticum aestivum
MPCARSGQWTRQSWSFSRWLIMVFDQICIHAWNSFMYSLCKNGGSKEAAEFFDSMTSKGLKPNIVVYSTLLHGYATEGCLADMINLFNSMKDNAIVANCNVFNILIDAYAKRGMMHEAMLIFTEMQEQRVSPNVFTYAIVTAALCRMGRLSDAMDKLNEMIAMGLQPNKVVYHSLIQGFCTHGDLVKAKALVSEMMNKGIPRPNIVFFSSVINSLCKEGRVTEAHDIFDLAINIGERPNVITFSSLIDGYCLAGKMDKAFGVLDANTFEYFKENMCKRISRWK

SEQ ID NO: 1257 - protein, 283 aa, Triticum aestivum; identical to SEQ ID NO: 1256

SEQ ID NO: 1258 - protein, 283 aa, Triticum aestivum; identical to SEQ ID NO: 1256

SEQ ID NO: 1259 - protein, 283 aa, Triticum aestivum; identical to SEQ ID NO: 1256

SEQ ID NO: 1260 - protein, 283 aa, Triticum aestivum; identical to SEQ ID NO: 1256

SEQ ID NO: 1261 - protein, 283 aa, Triticum aestivum
MPCARSGQWTRQSWSFSRWLIMVFDQICIHAWNSFMYPLCKNGGSKEAAEFFDSMTSKGLKPNIVVYSTLLHGYATEGCLADMINLFNSMKDNAIVANCNVFNILIDAYAKRGMMHEAMLIFTEMQEQRVSPNVFTYAIVTAALCRMGRLSDAMDKLNEMIAMGLQPNKVVYHSLIQGFCTHGDLVKAKALVSEMMNKGIPRPNIVFFSSVINSLCKEGRVTEAHDIFDLAINIGERPNVITFSSLIDGYCLAGKMDKAFGILDANTFEYFKENMCKRISRWK

SEQ ID NO: 1262 - protein, 283 aa, Triticum aestivum; identical to SEQ ID NO: 1256

SEQ ID NO: 1263 - protein, 254 aa, Triticum aestivum
  misc_feature (4)..(4): Xaa can be any naturally occurring amino acid
  misc_feature (33)..(34): Xaa can be any naturally occurring amino acid
  misc_feature (38)..(39): Xaa can be any naturally occurring amino acid
  misc_feature (42)..(46): Xaa can be any naturally occurring amino acid
MVSXGLRPDSFSYDTLLNGYCKAGRIDNACCLXXEMLXXGVXXXXXTYNTILNGLFRSGRFSEARELYVNMIKSRKLWSICTYSIILDGFCKNNCFDEAFKIFQSLCSMDLQLDIITFNIMIDGLFKGGRKEDAMDLFATISAYGLVPDVVTYRLIAENLIEEGSLGEFDGLFSAMEKSGTAPNSHMLNALVRRLLHRGDISRAGVYLYKLDEKNFSLEASTTSMLISLYSRGEYQPHAKSLPEKYRFLIEANS

SEQ ID NO: 1264 - protein, 186 aa, Triticum aestivum
MPRIPLCNSTMPMSRIGLRRRRLSSSFSTSTSTARSSRSWSPHAAFAAATERVRAGTLSPEDAHHLFDQLLRQDTPVQERSLGGFLAALARAPDSASCRDGPSLALSLFNRVCREEAGRRVAPPTAYTYAILMNCCCRVRRPDLGLALFGRLLRTGLKTNEIVANTLLKCLLLRKTDRRGCQRAAS

SEQ ID NO: 1265 - protein, 186 aa, Triticum aestivum; identical to SEQ ID NO: 1264

SEQ ID NO: 1266 - protein, 223 aa, Triticum aestivum
MPRIPLCNSTMPMSRIGLRRRRLSSSFSTSTSTARSSRSWSPHAAFAAATERVRAGTLSPEDAHHLFDQLLRQDTPVQERSLGGFLAALARAPDSASCRDGPSLALSLFNRVCREEAGRRVAPPTAYTYAILMNCCCRVRRPDLGLALFGRLLRTGLKTNEIVANTLLKCLCCAKRTDEAVSVLLHRMSKLSLVVCLMPSHTTQFLRAYVIIAAASGRSTSFR

SEQ ID NO: 1267 - protein, 223 aa, Triticum aestivum; identical to SEQ ID NO: 1266

SEQ ID NO: 1268 - protein, 186 aa, Triticum aestivum; identical to SEQ ID NO: 1264

SEQ ID NO: 1269 - protein, 186 aa, Triticum aestivum; identical to SEQ ID NO: 1264

SEQ ID NO: 1270 - protein, 226 aa, Triticum aestivum; identical to SEQ ID NO: 1228

SEQ ID NO: 1271 - protein, 137 aa, Triticum aestivum
MPRRSWPAGGAAHNLHLRRPHELMRPHSSALGLVFFGRLLRRGLKTNTIVFSSLLKCLCHAKRTDEAVSVLLHRMSELGCVPDAFSYTIVLKSLCDGSSSQRALDLLQMMEKGEGVCSPLAWCYIPRSSTASLRKGK

SEQ ID NO: 1272 - protein, 137 aa, Triticum aestivum; identical to SEQ ID NO: 1271

SEQ ID NO: 1273 - protein, 255 aa, Triticum aestivum
MLDRGICPDTVFFNTIMDRLCKNERVMEAQDLFDLMVHMGVKPDVCTYNTLIGGYLFVGKMDEVSKLLDNMVSIGMEPDVITYNILIDGYSKNGKIDDALVVFRGILERKDKPSVITFNIMIGALLKCRRKEEAKDLFDGIWAKGLVPDVVTYSLMIQKLIEEGSLQESDDLFLSMEKNGYPANSCMLNAIVRRLLQKGEMPRAGTYLSKIDERNFTLEASTTSLLTALASVGKCQEYKGLLPEKYHCFLEQGTD

SEQ ID NO: 1274 - protein, 255 aa, Triticum aestivum; identical to SEQ ID NO: 1273

SEQ ID NO: 1275 - protein, 255 aa, Triticum aestivum; identical to SEQ ID NO: 1273

SEQ ID NO: 1276 - protein, 255 aa, Triticum aestivum; identical to SEQ ID NO: 1273

SEQ ID NO: 1277 - protein, 255 aa, Triticum aestivum; identical to SEQ ID NO: 1273

SEQ ID NO: 1278 - protein, 255 aa, Triticum aestivum; identical to SEQ ID NO: 1273

SEQ ID NO: 1279 - protein, 260 aa, Triticum aestivum
MNYFLRCWIAAFVPTVFFNTIMDRLCKNERVMEAQDLFDLMVHMGVKPDVCNYNTLIGGYLFDGKMDEVRKLLDNMVSIGLKPDVITYTILIDGYSKNGRIDDALVVSREMLAGNVKPCVITLNIMIGALLKGGRKEEAKDLFDGIWAKGLVPTVVTYSLMIQKLIEEGSLQESDDLFLSMEKNGCAADSHMLNAIVRSLLRKGEVPRAGTYLSKIDERRFTLEASTASLLAAVASGGKGQEYKELLPEKYHYFLEQGTD

SEQ ID NO: 1280 - protein, 260 aa, Triticum aestivum; identical to SEQ ID NO: 1279

SEQ ID NO: 1281 - protein, 260 aa, Triticum aestivum; identical to SEQ ID NO: 1279

SEQ ID NO: 1282 - protein, 260 aa, Triticum aestivum; identical to SEQ ID NO: 1279

SEQ ID NO: 1283 - protein, 260 aa, Triticum aestivum; identical to SEQ ID NO: 1279

SEQ ID NO: 1284 - protein, 260 aa, Triticum aestivum; identical to SEQ ID NO: 1279

SEQ ID NO: 1285 - protein, 227 aa, Triticum aestivum
MSDLGCVPNCISHGIVLKSLCEDSRSQQALDLLRMMAKEGGACSPSLVTYNTVIHGFFKEGQVSKACNLYHEMMQQGVVPDVVTYNSIIDALCKARAMGKAELFLRQMVDNGVRPDNVTYTAVIHGYSTLGQWKKAAKMFREMTSLGLVPNTVTWNSSMASLCKHGRSKEAAEIFHSMAAKGHKPDVVSYRVLLQGYATEGALQIWLISIIQCQAMVLYPIARFSTY

SEQ ID NO: 1286 - protein, 227 aa, Triticum aestivum; identical to SEQ ID NO: 1285

SEQ ID NO: 1287 - protein, 272 aa, Triticum aestivum
MSCVYLKNFPAAHVQHRHQNGRTTDPRSICHFPDQARPPHPRRLTRRRRRRRRRSSSSTSTYPQPPGVQLPPPPPQLLLSHPAHVTMFRMRLRNSSTMPMSRIGLLLRRLSSSSSSSYFSTSTSPPSRSRSWSPRDAFAAATERVRAGTLSPEDAHHLFDQLLRQDTPVHERSLGGFLAALARAPDSAACRDGPALAIALFNRVCREEAGRPVVPPTVYTYAILMNCCCRVRRPDLGLALFGRLLRTGLKQMRSSPAPSSSASAAQNGQMKQ

SEQ ID NO: 1288 - protein, 272 aa, Triticum aestivum
MSCVYLKNFPAAHVQHRHQNGRTTDPRSICHFPDQARPPHPRRLTRRRRRRHRRSSSSTSTYPQPPGVQLPPPPPQLLLSHPAHVTMFRMRLRNSSTMPMSRIGLLLRRLSSSSSSSYFSTSTSPPSRSRSWSPRDAFAAATERVRAGTLSPEDAHHLFNQLLRQDTPVHERSLGGFLAALARAPDSAACRDGPALAIALFNRVCREEAGRPVVPPTVYTYAILMNCCCRVRRPDLGLALFGRLLRTGLKQMRSSPAPSSSASAAQNGQMKQ

SEQ ID NO: 1289 - protein, 272 aa, Triticum aestivum; identical to SEQ ID NO: 1288

SEQ ID NO: 1290 - protein, 272 aa, Triticum aestivum
MSCVYLKNFPAAHVQHRHQNGRTTDPRSICHFPDQARPPHPRRLTRRRRRRHRRSSSSTSTYPQPPGVQLPPPPPQLLLSHPAHVTMFRMRLRNSSTMPMSRIGLLLRRLSSSSSSSYFSTSTSPPSRSRSWSPRDAFAAATERVRAGTLSPEDAHHLFDQLLRQDTPVHERSLGGFLAALARAPDSAACRDGPALAIALFNRVCREEAGRPVVPPTVYTYAILMNCCCRVRRPDLGLALFGRLLRTGLKQMRSSPAPSSSASAAQNGQMKQ

SEQ ID NO: 1291 - protein, 272 aa, Triticum aestivum; identical to SEQ ID NO: 1287

SEQ ID NO: 1292 - protein, 272 aa, Triticum aestivum; identical to SEQ ID NO: 1288

SEQ ID NO: 1293 - protein, 188 aa, Triticum aestivum
MLHEMVECGTTVSLSTYNIILGGLCRNDCTDEAIVLFQKLGAMNVKLDITTLNTMIDAMYKVRRRQEAKDLFAAISASGLVPNSPTYGTMIQSLQKEGLMEEADNIFSSMEKSGCVLSSRLLNDIIRTLLEKGEILKAGNYMSKIDGKNAQLEASTSSLLLSLFSGEGESREQIQLLPVKYQFFDAVS

SEQ ID NO: 1294 - protein, 188 aa, Triticum aestivum
MLHEMVECGTTVSLSTYNIILGGLCRNDCTDEAIVLFQKLGAMNMKLDITTLNTMIDAMYKVRRRQEAKDLFAAISASGLVPNSPTYGTMIQSLLKEGLMEEADNIFSSMEKSGCVLSSRLLNDIIRTLLEKGEILKAGNYMSKIDGKNAQLEASTSSLLLSLFSGEGKYREQIQLLPVKYQFFDAVS

SEQ ID NO: 1295 - protein, 188 aa, Triticum aestivum; identical to SEQ ID NO: 1293

SEQ ID NO: 1296 - protein, 188 aa, Triticum aestivum; identical to SEQ ID NO: 1293

SEQ ID NO: 1297 - protein, 188 aa, Triticum aestivum; identical to SEQ ID NO: 1293

SEQ ID NO: 1298 - protein, 188 aa, Triticum aestivum; identical to SEQ ID NO: 1293

SEQ ID NO: 1299 - protein, 188 aa, Triticum aestivum; identical to SEQ ID NO: 1293

SEQ ID NO: 1300 - protein, 222 aa, Triticum aestivum
MSELGCVPDAFSYTIVLKILCDASSSQWALDLLQTMEKGGGVCSPDVVSYTTVIHNLLKEGEVSKACNLYHEMVQQGVVPDVRTYSSIINALCKAEAMDKAELFLRQMVDKGVRPNNKTYTSIIHGYSTLGRWKEAGKMFREMTSQGIIPDVVTWTSFMASFCKHGRSREAAKIFDYMSSRGHKPNVVSYSILFHGYGIEGCFADMINLLNSMANNGIVPNR

SEQ ID NO: 1301 - protein, 222 aa, Triticum aestivum
MSELGCVPDAFSYTIVLKILCDASSSQWALDLLQTMEKGGGVCSPDVVSYTTVIHNLLKEGEVSKACNLYHEMVQQGVVPDVRTYSSIINALCKAEAMDKAELFLRQMVDKGVRPNNKTYTSIIHGYSTLGRWKEAGKMFREMTSQGIIPDVVTWTSFMASFCKHGRSREAAKNFDYMSSRGHKPNVVSYSILFHGYGIEGCFADMINLLNSMANNGIVPNR

SEQ ID NO: 1302 - protein, 222 aa, Triticum aestivum; identical to SEQ ID NO: 1300

SEQ ID NO: 1303 - protein, 222 aa, Triticum aestivum
MSELGCVPDAFSYTIVLKIICDACSSQWALDLVQTMEKGGGVCSPDVVSYTTVIHDLLKEGEVSKACNLYHEMVQQGVVPDVRTYSSIINALCKAEAMDKAELFLCQMVDNGVRPNNKTYTSIIHGYSTLGRWKEAGKMFREMTSQGIIPDVVTWTSFMASFCKHGRSREAAKIFDYMSSRGHKPNVVSYSILFHGYGTEGCFADMINLLNSMANNGIVPNR

SEQ ID NO: 1304 - protein, 222 aa, Triticum aestivum; identical to SEQ ID NO: 1303

SEQ ID NO: 1305 - protein, 222 aa, Triticum aestivum; identical to SEQ ID NO: 1300

SEQ ID NO: 1306 - protein, 172 aa, Triticum aestivum
MDCCCRARRPELGLALFVRVLRKGLKTNQIVANTFLKCLCYAKRTDEAVNVLLHRMSELGCVPDAFSYNIVLKIFCDNSMSQRGLELLQMMAKEGGGCFPDMVAYNTVIHGLFKEGEIGKACNLFHEMVQQGVVPGVVTYSSIIDALCKARAMDKAELVLRQMVANGAQPNQ

SEQ ID NO: 1307 - protein, 172 aa, Triticum aestivum; identical to SEQ ID NO: 1306

SEQ ID NO: 1308 - protein, 172 aa, Triticum aestivum; identical to SEQ ID NO: 1306

SEQ ID NO: 1309 - protein, 172 aa, Triticum aestivum; identical to SEQ ID NO: 1306

SEQ ID NO: 1310 - protein, 189 aa, Triticum aestivum
MRSQGVMPNVVTCNSVMTYHCKNGRVKEAAEIFYSMAVNGRKPDVISYSIMLHGHATEGSIVEMIDLCELMARDGVVPNRSVFNILIKAYAKYGMMDVAMLFFEDMLKKGVNPNEVTYLTVISAFCKMGRMDDAMEKFNEMIDMGVPLDTEVYMCMVEGYFNHDDSMKAEEFITKMKSRDIFHRPRKGN

SEQ ID NO: 1311 - protein, 189 aa, Triticum aestivum; identical to SEQ ID NO: 1310

SEQ ID NO: 1312 - protein, 189 aa, Triticum aestivum; identical to SEQ ID NO: 1310

SEQ ID NO: 1313 - protein, 189 aa, Triticum aestivum; identical to SEQ ID NO: 1310

SEQ ID NO: 1314 - protein, 189 aa, Triticum aestivum; identical to SEQ ID NO: 1310

SEQ ID NO: 1315 - protein, 189 aa, Triticum aestivum; identical to SEQ ID NO: 1310

SEQ ID NO: 1316 - protein, 253 aa, Triticum aestivum
MSRRVVPVGRRILEQNIKARYHARDIGTEDALHLFDELLPYAGRSSIHAINCLLTVVGRDCPALGASLFNRVARSKVAPSSITYAILVDCCCRAGRQDLGHTAMGQVIKMGFLADAMITFSHLLKAICAENKTSYAMDILLRIMPMFNCVPDVISYNILFKGDCNEKRSQEALELIQVMVEHGGGCQPTVVSYSTVIDGLLKEGEVNKAYSLFCQMLQRGISPDVVTCSSIISGMCKLHAMDKAEEVLQQMLD

SEQ ID NO: 1317 - protein, 253 aa, Triticum aestivum; identical to SEQ ID NO: 1316

SEQ ID NO: 1318 - protein, 253 aa, Triticum aestivum; identical to SEQ ID NO: 1316

SEQ ID NO: 1319 - protein, 209 aa, Triticum aestivum
MDCCCRVRRPKLVLTLFSLFLMKGLKTNQIIVNTFLKCLCYAKRTDEAVNVLLHRMAELVCVPNAFSYNIVLKSFCDYSMSQRALELLQMIAKEGGGCFPDVVAYNTVIHGLFMEGETGKACNLFHEMVQQDVAPSVVTYISIIDALCKARAMEKAELVLWQMVANGAHPDTMTYSCMINGYSTSGRLKEATKLLREMTGRGLIPDIVT

SEQ ID NO: 1320 - protein, 259 aa, Triticum aestivum
MDCCCRVRRPKLVITLFSLFLMKGLKTNQIIVNTFLKCLCYAKRTDKAVNVLLHRMSELGCVPNAFSYNIVLKSSCDYSMSQRALELLQMIAEEGGGCFPDVVAYNTVIHGLFMEGETGKACNLFHEMVQQDVAPSVVTYISIIDALCKARAMEKTELVLWQMVANGAHPDTMTYSCMINGYSTSGRLKEATKLLREMTGRGLIPDIVTCNSFLASLCKLGRSKEAAEFFESMTAKGHKTGYRLIPHFASWVCYRRMLC

SEQ ID NO: 1321 - protein, 254 aa, Triticum aestivum
MDCCCRVRRPKLVLTLFSLFLMKGLKTNQIIVNTFLKCLCYAKRTDKAVNVLLHRMSELGCVPNAFSYNIVLKSFCDYSMSQRALELLQMIAKEGGGCFPDVVAYNTVIHGLFMEGETGKACNLFHEMVQQDVAPSVVTYISIIDALCKARAMEKAELVLWQMVANGAHPDTMTYSCKINGYSTFGRLKEATKLLREMTGRGLIPDIVTCNSFLASLCKLGRSKEAAEFFESMTAKGHKTGYRLIPHFASWVCY

SEQ ID NO: 1322 - protein, 254 aa, Triticum aestivum
MDCCCRVRRPKLVLTLFSLFLMKGLKTNQIIVNTFLKCLCYAKRTDKAVNVLLHRMSELGCVPNAFSYNIVLKSFCDYSMSQRALELLQMIAKEGGGCFPDVVAYNTVIHGLFMEGETGKACNLFHEMVQQDVAPSVVTYISIIDALCKARAMEKAELVLWQMVANGAHPDTMTYSCMINGYSTSGRLKEATKLLREMTGRGLIPDIVTCNSFLASLCKLGRSKEAAEFFESMTAKGHKTGYRLIPHFASWVCY

SEQ ID NO: 1323 - protein, 259 aa, Triticum aestivum; identical to SEQ ID NO: 1320

SEQ ID NO: 1324 - protein, 254 aa, Triticum aestivum; identical to SEQ ID NO: 1322

SEQ ID NO: 1325 - protein, 179 aa, Triticum aestivum
MDCCCRARRPDLGLAFFGRLLRTGLRTDGIDAYALIRCFCLAKRTDKAVSVLLHRMPELGCAPDALSYSVVLKVLCDDGRSQRALDLPQMMSKEGGGCAPNVVAYSTVIHGFCKEGEVSKACDLFNEMEHQGVKPNVVTYTSIIDALCKARAMDKAESFLRQMVDNDVRPNNVAYKCMI

SEQ ID NO: 1326 - protein, 179 aa, Triticum aestivum; identical to SEQ ID NO: 1325

SEQ ID NO: 1327 - protein, 179 aa, Triticum aestivum; identical to SEQ ID NO: 1325

SEQ ID NO: 1328 - protein, 179 aa, Triticum aestivum; identical to SEQ ID NO: 1325

SEQ ID NO: 1329 - protein, 179 aa, Triticum aestivum; identical to SEQ ID NO: 1325

SEQ ID NO: 1330 - protein, 179 aa, Triticum aestivum; identical to SEQ ID NO: 1325

SEQ ID NO: 1331 - protein, 179 aa, Triticum aestivum; identical to SEQ ID NO: 1325

SEQ ID NO: 1332 - protein, 243 aa, Triticum aestivum
MSSLRVLRRSSTSTSTSTSPPSRSWSPTAAFAAATERVRAGTLSQDDAHHLFDELLRQVTPVPERPLNGFLAALARATSSAACIRDGPALDVALFNRVCREQAGPRVAPLTVHTYNILMDCCCRASRPDLGLAFFARLLRTGLKTDEITANTFLKCLCYAKRTDEAVNVLLHRMSELGCVPNAFSYSIVLKSLCDNSMSQRALDLLQMMAKEGGACSPNVVAYSTVIHGFLGRRNRQGMQSVP

SEQ ID NO: 1333 - protein, 243 aa, Triticum aestivum; identical to SEQ ID NO: 1332

SEQ ID NO: 1334 - protein, 243 aa, Triticum aestivum; identical to SEQ ID NO: 1332

SEQ ID NO: 1335 - protein, 243 aa, Triticum aestivum
MSSLRVLRRSSASTSTSTSPPSRSWSPTAAFAAATERVRAGTLSQDDAHHLFDELLRQVTPVPERPLNGFLAALARATSSAACIRDGPALDVALFNRVCREQAGPRVAPLTVHTYNILMDCCCRASRPDLGLAFFARLLRTGLKTDEITANTFLKCLCYAKRTDEAVNVLLHRMSELGCVPNAFSYSIVLKSLCDNSMSQRALDLLQMMAKEGGACSPNVVAYSTVIHGFLGRRNRQGMQSVP

SEQ ID NO: 1336 - protein, 243 aa, Triticum aestivum; identical to SEQ ID NO: 1335

SEQ ID NO: 1337 - protein, 243 aa, Triticum aestivum; identical to SEQ ID NO: 1332

SEQ ID NO: 1338 - protein, 133 aa, Triticum aestivum
MDCCCRARRPDLGLALFGRFLRTGLRTNEIVATTFLKCLCCAKQIDEAVKVLLHRMPKLGCVPNAISYSIVLKSLCENSMSQQALDLLQMVGKEGGCLRDVMAYNTIIHGFFKEGGIDKARGYADCGDIQHSN

SEQ ID NO: 1339 - protein, 228 aa, Triticum aestivum
MPRLCSTTPMARLRRRRRYSSSTSSPSRRWDPRAAFAAATERIRAGTLRPEDAHHLFDELLLQANPVPERSLSDFLAALARAPSSAALRDGPSLALGLFNLVCREEAGPQVAPPTTCTYNILMDSCCRARRPDLGLAFFGRFLSTGLKANQIVATTLLKCLCHARRTDEAINVLLHRMSEFGCVPNVISYSIVLKSLCDDSRSQQALDLLQMVRKGGAAPSVWWHIAQ

SEQ ID NO: 1340 - protein, 228 aa, Triticum aestivum; identical to SEQ ID NO: 1339

SEQ ID NO: 1341 - protein, 228 aa, Triticum aestivum; identical to SEQ ID NO: 1339

SEQ ID NO: 1342 - protein, 228 aa, Triticum aestivum; identical to SEQ ID NO: 1339

SEQ ID NO: 1343 - protein, 228 aa, Triticum aestivum; identical to SEQ ID NO: 1339

SEQ ID NO: 1344 - protein, 228 aa, Triticum aestivum; identical to SEQ ID NO: 1339

SEQ ID NO: 1345 - protein, 246 aa, Triticum aestivum
  misc_feature (92)..(92): Xaa can be any naturally occurring amino acid
  misc_feature (95)..(95): Xaa can be any naturally occurring amino acid
  misc_feature (97)..(97): Xaa can be any naturally occurring amino acid
  misc_feature (102)..(102): Xaa can be any naturally occurring amino acid
  misc_feature (114)..(114): Xaa can be any naturally occurring amino acid
  misc_feature (119)..(119): Xaa can be any naturally occurring amino acid
  misc_feature (161)..(161): Xaa can be any naturally occurring amino acid
MIDKGVKPDNLTYTIIIDGLCKAQSVDRAEGVFQQMIDKGVKPNNGTYNCLIHGYLSTGQWEEVVQRIKEMSAHDLEPDVFTYGLLLDYLCXNGXCXEARSXFDSMIRKGIKPXVTIYXIMLHGYGTKGALSEMHDLLNLMVANGISPNHRIFNTMIYAYXKEAMIDEAMHIFIKMKQQGLSPDAVSYAELIDALCKLGRVDDAVLQFKQMINEGVTPDNVVFNSLVYGLCTVDKWEKVENYFSKC

SEQ ID NO: 1346 - protein, 253 aa, Triticum aestivum
MSRRFVPVDRRILERNIKARYHAGDIGTEDALNLFDELIQVAGPSSVLAINCLLTVVGRDCPALGVSLFNRVARAKVPPHNITYGILVDCCCRAGRLDLGHAGMGHVIKLGFAAEAIVNFSHLLKAICAEEKTSYAMEIVLRIMPEFNCIPNIFSYSILLKGLCNEKRSQEALELIHMMIDHGGSCQPNVVSYSTVLDGLLKDGEVGKAYSLFCVMLQRGISPNVVTCNSIISGMCKVHAMDKAEEVLQQMTD

SEQ ID NO: 1347 - protein, 253 aa, Triticum aestivum; identical to SEQ ID NO: 1346

SEQ ID NO: 1348 - protein, 253 aa, Triticum aestivum; identical to SEQ ID NO: 1346

SEQ ID NO: 1349 - protein, 205 aa, Triticum aestivum
MSRRFVPVDRRILERNIKARYHAGDIGTEDALNLFDELIQVAGPSSVLAINCLLTVVGRDCPALGVSLFNRVARAKVPPHNITYGILVDCCCRAGRLDLGHAGMGHVIKLGFAAEAIVNFSHLLKAICAEKKTSYAMDIVLRIMPEFNCIPNIFSYSILLKGLCNEKRSQEALELIHMMIDHGGSCQPNVVSYSTVLDGLLKEGE

SEQ ID NO: 1350 - protein, 205 aa, Triticum aestivum
MSRRFVPVDRRILERNIKARYHAGDIGTEDALNLFDELIQVAGPSSVLAINCLLTVVGRDCPALGVSLFNRVARAKVPPHNITYGILVDCCCCAGRLDLGHAGMGHVIKLGFAAEAIVNFSHLLKAICAEKKTSYAMDIVLRIMPEFNCIPNIFSYSILLKGLCNEKRSQEALELIHMMIDHGGSCQPNVVSYSTVLDGLLKEGE

SEQ ID NO: 1351 - protein, 241 aa, Triticum aestivum
MSSLRLLRRSSTSTSTSPPSRSWSPTAAFAAATERVRAGTLSQDDAHHLFDELLRQATPVPERPLNGFLAALARATSSAACITDGPALAVALFNRVCREQSGPRVVPLTVCTYNILMDCCCRTSRTDLGLAFFARLLRTGLKTDEITANTFLKCLCYAKRTDEAVNVLLHRMSELGCVPNAFSYSIVLKSLCNNNMSQRALDLLQMMAKDRGSCFPDVVAYSSHPWLFQGRRNKQGMQSVP

SEQ ID NO: 1352 - protein, 264 aa, Triticum aestivum
MSRLQVRSFSSSVSSRANELLNELHDHLGFGTLRPELAHQLFDEMLHQPVTVSVRALDDLFAALARVPASPACTDGPALAIDLFNRMARAGRRQVLAPSIYTYNILIECCHRACRPDLGPAFFGRLLKTGIKTDVVTYSSLLKCLCDMKRTEEALGVLLHRMPDDLPNVISYSVILKSFCDSGRSQLALDLLRMMAEKGSDHSPSMVLYSLVIDGFLKEGEISKACNLLPEMMQQGVVPDVVTYNSFIDALCKARAMDKAEVVL

SEQ ID NO: 1353 - protein, 264 aa, Triticum aestivum
MSRLQVRSFSSSVSSRANELLNELHGHLGFGTLRPELAHQLFDEMLHQPITVSVRALDDLFAALARAPASPACTDGPALAIDLFNRMARAGRRQVLAPSIYTYNILIECCHRACRPDLGPAFFGRLLKTGIKTDVVTYISLLKCLCDMKRTEEALGVLLHRMPDDLPNVISYSVILKSFCDSGRSQLALDLLRMMAEKGSDHSPSVVLYSLVIDGFLKEGEISKACNLLPEMMQQGVVPDVVTYNSFIDTLCKAREMDKAEVVL

SEQ ID NO: 1354 - protein, 264 aa, Triticum aestivum
MSRLQVRSFSSSVSSRANELLNKLHDHLGFGTLRPELAHQLFDEMLHQPVTVSVRALDDLFAALARVPASPACTDGPALAIDLFNRMARAGRRQVLAPSIYTYNILIECCHRACRPDLGPAFFGRLLKTGIKTDVVTYSSLLKCLCDMKRTEEALGVLLHRMPDDLPNVISYSVILKSFCDSGRSQLALDLLRMMAEKGSDHSPSMVLYSLVIDGFLKEGEISKACNLLPEMMQQGVVPDVVTYNSFIDALCKARAMDKAEVVL

SEQ ID NO: 1355 - protein, 264 aa, Triticum aestivum
MSRLQVCSFSSSVSSRANELLNELHDHLGFGTLRPELAHQLFDEMLHQPVTVSVCALDDLFAALARVPASPACTDGHALAIDLFNRMARAGRRQVLAPSIYTYNILIECCHRACRPDLGPAFFGRLLKTGIKTDVVTYSSLLKCLCDMKRTEEALGVLLHRMPDDLPNVISYSVILKSFCDSGRSQLALDLLRMMAEKGSDHSPSVVLYSLVIDGFLKEGEISKACNLLPEMMQQGVVPDVVTYNSFIDALCKARAMDKAEVVL

SEQ ID NO: 1356 - protein, 264 aa, Triticum aestivum; identical to SEQ ID NO: 1354

SEQ ID NO: 1357 - protein, 264 aa, Triticum aestivum; identical to SEQ ID NO: 1352

SEQ ID NO: 1358 - protein, 264 aa, Triticum aestivum; identical to SEQ ID NO: 1354

SEQ ID NO: 1359 - protein, 177 aa, Triticum aestivum
MAQQGVKPNVVTYNSVIDALCKAKAMDKAEVVLRQMIDHSVGPNSVTYSSLIHGYSSSGHWKEAVRVFKEMTSRRVTADVHTYNMFMTFLCKNGKSKDAAEIFNSMATKGLKPTTVSYAILLHGYATEGCLVDMTNFFNSMERDCILPDCCIFSILINAYAKSGKLDKAMLLHTAIW

SEQ ID NO: 1360 - protein, 215 aa, Triticum aestivum
MSHVRLHLHRRLLSSTSPPSRSWSPRDAFAVTTERLRAGTLCRDDAHNLFDELFRQAIPVPDRSLNGFLAALARATSSGACIRDGPALFNRVCREQAGSQVAPLTVHTYNILMDCCCRACRPDLGLALFGCILRTGLKIEQITANTLLKCLCYAKRTEEAVYVLLHRMSELGCVPDAFSCSIVLKSLCDNSMSQRGLDLLQMMAKGGGCSLNVGI

SEQ ID NO: 1361 - protein, 215 aa, Triticum aestivum
MSHVRLHLHRRLLSSTSPPSRSWSPRDAFAATTERLRAGTLCRDDAHNLFDELFRQAIPVPDRSLNGFLAALARATSSGACIRDGPALFNRVCREQAGSQVAPLTVHTYNILMDCCCRARRPDLGLALFGCILRTGLKIEQITANTLLKCLCYAKRTEEAVYVLLHRMSELGCVPDAFSCSIVLKSLCDNSMSQRGLDLLQMMAKGGGCSLNVGI

SEQ ID NO: 1362 - protein, 215 aa, Triticum aestivum; identical to SEQ ID NO: 1361

SEQ ID NO: 1363 - protein, 215 aa, Triticum aestivum; identical to SEQ ID NO: 1361

SEQ ID NO: 1364 - protein, 215 aa, Triticum aestivum; identical to SEQ ID NO: 1361

SEQ ID NO: 1365 - protein, 215 aa, Triticum aestivum
MSHVRLHLHRRLLSSTSPPSRSWSPRDAFAATTERLRAGTLCRDDAHNLFDELFRQAIPVPDRSLNGFLAALARATSSGACIRDGPALFNRVCREQAGSQVAPLTVHTYNILMDCCCRARRPDLGLALFGCILRTGLKIEQITANTLLKCLCYAKRTEEAVYVLLHRMSELGCVPDAFSCSIVLKSLCDNGMSQRGLDLLQMMAKGGGCSLNVGI

SEQ ID NO: 1366 - protein, 249 aa, Triticum aestivum
MPRVRPGSSSSTVSSRANQLLNKLKDHLDSGTLQPERAHQLFDKLLRQTVPVSASALNGLFAALARALPSAACTDGPALAIALFNRMAREGRRVIAPNIYTYSILIDCCCRSRRPDLGPAFFGFLLKTGIKADIITFTSLFKCLCHMKRIDEAVGVLLHRMPGDMPDAISYSIILKSFCNEGRSQRALDLLRMMAKKGANHSPEACTIVICGLIKEGELSKACSLFHEMMQQGVVPSVVAYSSIIDGLC

SEQ ID NO: 1367 - protein, 224 aa, Triticum aestivum
MEKALRVLDDMASAGIEPNVVTYGTLVDGYCRSGRIDDGLMLFREMLHKRVEPTTVTYNIILNGLFHAGRTVAAKMFHEMIKSGITVSISTYMIIHGGLCRNSHADEAITLFQKLGAMDVKLDVTILNTMINAMFKVQRREEANDLFAAISASGLVPNASTYGKNIQNLLEEGSLEEADDMFSSMEKSGCAPSSCLLNFIIRTLLKKGEIVKAGNYLYSYKKHT

SEQ ID NO: 1368 - protein, 224 aa, Triticum aestivum; identical to SEQ ID NO: 1367

SEQ ID NO: 1369 - protein, 224 aa, Triticum aestivum; identical to SEQ ID NO: 1367

SEQ ID NO: 1370 - protein, 224 aa, Triticum aestivum; identical to SEQ ID NO: 1367

SEQ ID NO: 1371 - protein, 249 aa, Triticum aestivum
MSRRYTITLISRLRVPRRCSSSTSISPPSRSWSPRDAFAAATERVRAGTLSPEDAHNLFDELLRQGTPVPERSLNGFLAALARATSSTACIKDGPALALALFNRVCREEASPQVAVPTVCTYSVLMDCCCRARRPDLGLALFGCILRKGLKIDQITANTLLKCLCYAKQTEEAVYVLLHRMSELSCVPDAFAYNIVLKSLCKGSRSQRAHDLLRTMAKDRGGCFPDVVTYTTVIHGFFKEGETGMQSIP

SEQ ID NO: 1372 - protein, 222 aa, Triticum aestivum
MLCKGLKPTTFNYNVILDGLFLAGQTVAAKEKFHEMVESGVTVCIDTYSIVLGGLCRNSCSSEAITLFQKLSAMNVKFDITIVNIIIGAFYRVERNQEAKDLFAAIPANGLVPNVVTYTIMMTNLIKEGSVEEADNLFLSMEKSGCTANSCLLNHIIRRLLEKGEIVKAGNYMSKVDAKSYSLEAKTVSQLISLFSRKGKYREHIKLLPTKYQFLEEAATVE

SEQ ID NO: 1373 - protein, 178 aa, Triticum aestivum
MPHLRLRRFSTAPMFHLLHCSSSSTSTSPPSRSWSPHAAFAAATERVRAGTLSPEDVHHLFDELLRQATPVPRRSLNGFLSTLARAPASAACIRASQQVAPLTVHTYGILMGCFCGARRPDLGLALFGRFLRTGLKTNEIIATTFLKCLCSAKRTDECRCQNRRISGRGSRTVRLGGW

SEQ ID NO: 1374 - protein, 198 aa, Triticum aestivum
  misc_feature (35)..(35): Xaa can be any naturally occurring amino acid
  misc_feature (37)..(37): Xaa can be any naturally occurring amino acid
MHSNEALDLLLHRMPELDCAPDVFSFNIVINGCFXEXEVDKACNLFHEMPQLGVQPDVVTYTSIMDALSKSGAMDKAEVLLRQMVDQGIEPNIRTYSCLIHGYSTFGQWKEALRVFKEMASLGVRPNSVTLNSFIDSLCKHRKTKKARDIFDSMAAKGHKPDIFSYSTMLNWYAKEGCFDDMTDLFNSMVRNGIVRNG

SEQ ID NO: 1375 - protein, 153 aa, Triticum aestivum
MRQRAAERTPLHGHLGFGTLRPDLAHQLFDEMLRQPVPVSVRALNGLFAALARAPPSTICTDAPALAIDLFNRMAQAGRRQVPAPTIITYNILIGCCHRACRPDLGPAFFGRLLKTGIKTNVITYNSLLKCLCDMKRTEEALGAAPQDARRPA

SEQ ID NO: 1376 - protein, 153 aa, Triticum aestivum; identical to SEQ ID NO: 1375

SEQ ID NO: 1377 - protein, 153 aa, Triticum aestivum; identical to SEQ ID NO: 1375

SEQ ID NO: 1378 - protein, 153 aa, Triticum aestivum; identical to SEQ ID NO: 1375

SEQ ID NO: 1379 - protein, 244 aa, Triticum aestivum
MPRRIPLPMPRRICIWLRCSSPSSSCTYPDSGLRHPSCLTSTLSGLRLRRSFTTPMSNLRLFRRSSSSTSTPTSRSSRSWSPHAAFAAATERVRAGTMNQDYAHNLFDELLRQATPVPGRSLNGFLAALARATSSAACIRNGPALTVALFNRVCREQAGLRVAPLTVHTYNILMDCCCRASRPDLGLALFGRFLRTGLKTNEIVASTLLKCLCYTKRTDEALNVLLHRMSELGCCLMPSHTTLF

SEQ ID NO: 1380 - protein, 244 aa, Triticum aestivum; identical to SEQ ID NO: 1379

SEQ ID NO: 1381 - protein, 244 aa, Triticum aestivum
MPRRIPLPMPRRICIWLRCSSPSSSCTYPDSGLRHPSCLTSTLSGLRLRRSFTTPMSNLRLFRRSSSSTSTPTSRSSRSWSPHAAFAAATERVRAGTMNQDYAHNLFDELLRQATPVPGRSLNGFLAALARATSSAACIRNGPALTVALFNRVCREQAGLRVAPLTVHTYNILMDCCCRASRPDLGLALFGRFLRTGLKTNEIVASTLLKCLCYAKRTDEALNVLLHRMSELGCCLMPSHTTLF

SEQ ID NO: 1382 - protein, 244 aa, Triticum aestivum; identical to SEQ ID NO: 1379

SEQ ID NO: 1383 - protein, 244 aa, Triticum aestivum; identical to SEQ ID NO: 1379

SEQ ID NO: 1384 - protein, 244 aa, Triticum aestivum; identical to SEQ ID NO: 1379

SEQ ID NO: 1385 - protein, 252 aa, Triticum aestivum
MRVTYSSIINALCKARAMDKAEVILRHMVHNGVQPHDRIYNTLIHGFLTLGQLKEAFRLLKVMRSQGSMPNGVTCTSVMDYLCKHGRIKEAEEIFYSMAVNGRKPDIVSYSIMLHGYAIEGSLVQMIDLCELMARDGVVPNLRCFNILINAYAKYGRMDVAMLFFEDMLKQGVKPNEFTYLTVISAFCKMGRMDDAMEKFSEMIDMGVPLETEVYMCMVEGYFNHGDSMKAEEFITKMKNRDIHHKPWKGNR

SEQ ID NO: 1386 - protein, 243 aa, Triticum aestivum
MMQQGVEPSVWTYSSIIDALCKARAMDKAELVLQQMVNKGVQPNNVTYNCMIHGYSTSGRWKEAAKLFREMKSRGLIPDTFTCNALMTYLCKHGRSKEAAEISDAMTAKGHKPDIVSYSILLHGYANEGCFADMIDLFNSMERNGIAADCHVFSILIGAYAKCELMDEAMLKFTQMRRQGVSPDAFTYSTVIVALCRVGRLADAIGKFGEMIAMGVQPDRPVYRSLIQGCFMHGGLVKATAGF

SEQ ID NO: 1387 - protein, 243 aa, Triticum aestivum; identical to SEQ ID NO: 1386

SEQ ID NO: 1388 - protein, 243 aa, Triticum aestivum; identical to SEQ ID NO: 1386

SEQ ID NO: 1389 - protein, 243 aa, Triticum aestivum; identical to SEQ ID NO: 1386

SEQ ID NO: 1390 - protein, 243 aa, Triticum aestivum; identical to SEQ ID NO: 1386

SEQ ID NO: 1391 - protein, 243 aa, Triticum aestivum; identical to SEQ ID NO: 1386

SEQ ID NO: 1392 - protein, 225 aa, Triticum aestivum
MVHNGVQPDVVTYNSLIQRFLTSGQLKEAIRLLKLMTSQGIMPDVVTCNSVMTYHCKNGRVKEAAEIFYSMAVKGRKPNVISYSIMLHGYAIQGPLVEMIDLCELMARDGVVPNLHCFNILINAYAKYGRMDVAMLFFEDMLKQGVKPNEFTYLTMMSAFCKMGRMDDVMEKLSEMIDMGVPVDTEVCMCMVEGYFNHGDSMKAKEFITRMKNMDIHHKPRKGNR

SEQ ID NO: 1393 - protein, 225 aa, Triticum aestivum; identical to SEQ ID NO: 1392

SEQ ID NO: 1394 - protein, 225 aa, Triticum aestivum; identical to SEQ ID NO: 1392

SEQ ID NO: 1395 - protein, 225 aa, Triticum aestivum; identical to SEQ ID NO: 1392

SEQ ID NO: 1396 - protein, 225 aa, Triticum aestivum; identical to SEQ ID NO: 1392

SEQ ID NO: 1397 - protein, 217 aa, Triticum aestivum
MEKALRVLDDMASAGIEPNVVTYGTLVDGYCRSGRIDDGLMLFREMLHKRVEPTTVTYNIILNGLFHAGRTVAAKMFHEMIKSGITVSISTYRIIHGGFCRNSHADEAITLFQKLGAMDVKLDVTILNTMINAMFKVQRREEANDLFAAISASGLVPNASTYGKNIQNLLEGGSLEEADDMFSSMEKSGCAPSSCLLNQNVIGKGGDSQGWKLSLLI

SEQ ID NO: 1398 - protein, 217 aa, Triticum aestivum; identical to SEQ ID NO: 1397

SEQ ID NO: 1399 - protein, 243 aa, Triticum aestivum
MSRRLVPVGSRLLERNIEHRYRSRNIGTEDALNLFGELIQDPGPTSVRAINGLLTVVGRDCPALGISLFNRVARAKVPPHNITYGILVDCCCRAGRLDLGHAAMGHVIKLGFAAEAIVNFSHLLKAICAEKKTSYAMDIVLRIMPMFNCIPNIFSYSILFKGLCNEKRSQEALELIHLMVEDGGSCQPNVVSYTTVVDGLLKEGEVGKAYSLFCEMLQRGISPDDVTYNSIISGMCKVHAMEG

SEQ ID NO: 1400 - protein, 246 aa, Triticum aestivum
MEKGGVCSPDVVSYTTVIHGLLKEGEVSKACSLFDEMVQQGVVPNVVTYSSIIDALCKAGAMDKTELVLWQMVDSGIQPDNVTYTSMIHGYSTLGRWKEAGKMFREMTSRGIIPDVVTWTSFMTSLCKHGRSREATGIIDYMSAKCHKPNIVLYSILFHGYATEGCFDDMINLLDSMANNAIVPNRQVFSILVDAYAKRGMMDEAMPIFTGMCEQGVIRDVYRWGQGVSPESTVGRLADALNKFVR

SEQ ID NO: 1401 - protein, 246 aa, Triticum aestivum; identical to SEQ ID NO: 1400

SEQ ID NO: 1402 - protein, 246 aa, Triticum aestivum; identical to SEQ ID NO: 1400

SEQ ID NO: 1403 - protein, 246 aa, Triticum aestivum; identical to SEQ ID NO: 1400

SEQ ID NO: 1404 - protein, 246 aa, Triticum aestivum
MEKGGVCSPDVVSYTTVIHGLLKEGEVSKACSLFDEMVQQGVVPNVVTYSSIIDALCKAGAMDKTELVLWQMVDSGIQPDNVTYTSMIHGYSTLGRWKEAGKMFREMTSRGIIPDVVTWTSFMTSLCKHGRSREATGIIDYMSAKCHKPNIVLYSILFHGYATEGCFDDMINLLDSMANNAIVPNRQVFSILVDAYAKRGMMDEAMPIFTGMCEQGVIPDVYRWGQGVSPESTVGRLADALNKFVR

SEQ ID NO: 1405 - protein, 246 aa, Triticum aestivum; identical to SEQ ID NO: 1404

SEQ ID NO: 1406 - protein, 225 aa, Triticum aestivum
MSRRLVPVGRRILEQSIKDRYYSAGIGTEDALQLFDELLPDAEPSLIRAINCLLTVIGRDCPALGVSHFNRVARANVAPNSITYTILVDCCCRAGRLDLGFAAMGHIIKMGFTAEAIFTFNHLLKAICAEKKTSYAMDIVLRIMPELNCTPNVFSYNILFKGLCNEKRSQEALELINIMVEDGGSCRPDVVTYNTVIGGLLKEGVVDKAYSLFCEMLKGRFCQML

SEQ ID NO: 1407 - protein, 225 aa, Triticum aestivum; identical to SEQ ID NO: 1406

SEQ ID NO: 1408 - protein, 225 aa, Triticum aestivum; identical to SEQ ID NO: 1406

SEQ ID NO: 1409 - protein, 225 aa, Triticum aestivum; identical to SEQ ID NO: 1406

SEQ ID NO: 1410 - protein, 225 aa, Triticum aestivum; identical to SEQ ID NO: 1406

SEQ ID NO: 1411 - protein, 225 aa, Triticum aestivum; identical to SEQ ID NO: 1406

SEQ ID NO: 1412 - protein, 222 aa, Triticum aestivum
MTNRSVTPDVCTYNLLMTSLYKNGNSKEAAQLFYSMATKGLKPDTVSYAILLHGYATEGCLVDMINLFNSMATDCILPNCHIFNILIYAYAKSGKLDKAMLIFKDMQKQGVSPDAVTYSTVIHAFCKKGRLDDAVIKFNQMIDTGVRPEASAYRSLIQGFCTHGDLVKAKEYVTEMMKKGMLPPDIMFFSSIMQKLCTEGREIIYRKLMQRATHLKLKLFRC

SEQ ID NO: 1413 - protein, 239 aa, Triticum aestivum
MVHSGVRPDTVTYTSLIHGYSTLGQFEEVVRLLEEMRSLGVKPNVFTCNTVMDYLWKHGRIKEAAEFFYSMAEKGHKPNIVSYAIMLHGYAKEGSLVEMSDLCELMARDGIVPDLRCFNILINAYAKCGMMDVAILFFKDMLKQGVNPDEITYLAVIAGYCRVGMMDDAMENFNEMIGMGVPHNATVYRCMIQGYLNHGDFLKAKELITEMKTKGIHPRPRKSQGIDPGYLMTQLFTGA

SEQ ID NO: 1414 - protein, 217 aa, Triticum aestivum
MSRIHLHRRLFSSTTRPLRSWSPRAAFAAVTERVRAGALSQDDAHHLFDELLRQATPVPGRSLDGFLAALVRAPASGACRDGPALALALFNRVCRDESGARVAPPTIFTYGILMNCCCRAHRPDLGLAFFARLLTTGLKADQIAANTFLKCLCYAKRTDEAVNVLLHRMSELGCVPNAFSYSIVLKSLCDNSMSQRALDLLQMMTRWRNDKSGSYTR

SEQ ID NO: 1415 - protein, 217 aa, Triticum aestivum
MSRIHLHRRLFSSTTRPLRSWSPRAAFAAVTERVRAGALSQDDAHHLFDELLRQATPVPGRSLNGFLAALVRAPASGACRDGPALALALFNRVCRDESGARVAPPTIFTYGILMNCCCRAHRPDLGLAFFARLLTTGLKADQIAANTFLKCLCYAKRTDEAVNVLLHRMSELGCVPNAFSYSIVLKSLCDNSMSQRALDLLQMMTRWRNDKSGSYTR

SEQ ID NO: 1416 - protein, 217 aa, Triticum aestivum; identical to SEQ ID NO: 1415

SEQ ID NO: 1417 - protein, 217 aa, Triticum aestivum; identical to SEQ ID NO: 1414

SEQ ID NO: 1418 - protein, 217 aa, Triticum aestivum; identical to SEQ ID NO: 1415

SEQ ID NO: 1419 - protein, 217 aa, Triticum aestivum; identical to SEQ ID NO: 1414

SEQ ID NO: 1420 - protein, 201 aa, Triticum aestivum
MTRLHSTMACACRVRIRCRRLSSSATSPSSRSWSPRAAFAASTERFRAGTLGRPDAHRLFDELLRRDTLVPSCSLNGLLPVLARATSSASCVTDGPALAVALFSRVLRAEAGPWVACPTVCTYGILMDCCYRVRRPDLGRASGRASRQTRSSPTTRSSASATPSGPTRPSACCFMGCPTSAVCLMPSHTTFRKRLSEDRRS

SEQ ID NO: 1421 - protein, 201 aa, Triticum aestivum; identical to SEQ ID NO: 1420

SEQ ID NO: 1422 - protein, 201 aa, Triticum aestivum; identical to SEQ ID NO: 1420

SEQ ID NO: 1423 - protein, 201 aa, Triticum aestivum; identical to SEQ ID NO: 1420

SEQ ID NO: 1424 - protein, 201 aa, Triticum aestivum; identical to SEQ ID NO: 1420

SEQ ID NO: 1425 - protein, 201 aa, Triticum aestivum; identical to SEQ ID NO: 1420

SEQ ID NO: 1426 - protein, 236 aa, Triticum aestivum
MDWPPSTGTTWKSTNRIDRLPLESSCSAFTTHTSKAMPRFSSTPPMSPPRLRVGLGAGHSSSTSHPSRIWDPHAAFAAATERARSGNLTPEDAHHLFDELLRQGNPVQERPLNNLLAALARAPASAACSDGPALAVNLFSRISQGARRRVAHPTACTYSILMDCCCRVHRLDLAFAFFARLLRTGLKANQVIFCTLLKGLCHAKRTDEALDVLLHRMPELGCTPNAVAYNPISVCI

SEQ ID NO: 1427 - protein, 236 aa, Triticum aestivum; identical to SEQ ID NO: 1426

SEQ ID NO: 1428 - protein, 243 aa, Triticum aestivum
MDYLCKSGRCGEARKLFDSMISLGQKPTVTTYNILLHGYAMERYFHDMHCLIDLMAENGISPDHYVYNILIFAYAKEKMVGEVMHIFTKMRQQGFNPDAASYGTGINLLCSIGRMDDAVLQFNQMVTEGLAPDIIVFTTLLSGFCSCGKWEKVHELFSEMLNRGIYPNAVFFNKIMSPLCKNGRVMAAQDLFDLMIHMGVKPDMHAYNTMMGGYMFVGKMDEVRKLLDNMVSTGLEPDIFTYG

SEQ ID NO: 1429 - protein, 243 aa, Triticum aestivum; identical to SEQ ID NO: 1428

SEQ ID NO: 1430 - protein, 239 aa, Triticum aestivum
MLLCMVYFLMITDGLSLFMEMSLSGVKPTTIMYNIILDGLFCSGRTVSAKEKFDTMIESGIPVGIDTYNIVLSGLCKNNCTDEAIELFKKLRAMNVKIDVITLNTMISAMFKTRRIEEAKDLFATISAIGLVPSVVTYILMITNFIKEGLLAEADDMFLAMEKAGCAPNSSLLNQVVRVLLEKGAAVQAATYLAKIDAKHLSLEASTVSLIISLFSRKGELWEHVKLLPVKYQPPEMFD

SEQ ID NO: 1431 - protein, 239 aa, Triticum aestivum; identical to SEQ ID NO: 1430

SEQ ID NO: 1432 - protein, 239 aa, Triticum aestivum; identical to SEQ ID NO: 1430

SEQ ID NO: 1433 - protein, 239 aa, Triticum aestivum; identical to SEQ ID NO: 1430

SEQ ID NO: 1434 - protein, 239 aa, Triticum aestivum; identical to SEQ ID NO: 1430

SEQ ID NO: 1435 - protein, 239 aa, Triticum aestivum; identical to SEQ ID NO: 1430

SEQ ID NO: 1436 - protein, 242 aa, Triticum aestivum
MMNRGIPHSNIPFFGSVIKNLCQEGRVMDAHEIFDLVIDMGERPDDILFNSLIVGYCLVGKMDKALKVLDVMESVGVEPDVITYNTLVNGYCKSGRIDDGFVLFREMPSKRVKPDTVTYGIILAGLFRAWRTVDARTMFHEMIESGITVDIVTYNIILTGLCRNNCIDEAIALFQKLGVMSVKFNIAILNTMIDAMYKVWRREEVSDLFAAISASTSRKTPISPGSLGPLVLVHEPGLMGRY

SEQ ID NO: 1437 - protein, 226 aa, Triticum aestivum
MGKAELFLRRMVDNSVQPDRVTYTSMIHGYSTLGRWKEATKMFREMTGRGLIPNIVTWNSFMASLCKHGRSKEAAEIFFSMAAKGNKPNIITYGILLHGYGNEGSFVDMMSLFNSMKGNGIVANRQVFNILIDAYAKRGLIDEAVLILTEMRGHGLSPDVLPKKGFPPLCIQSNQPNHTEIGVGAEAAQSRPKETTEKEQKKQMPTTADQQKRRSLAIAAPTGIFH

SEQ ID NO: 1438 - protein, 226 aa, Triticum aestivum; identical to SEQ ID NO: 1437

SEQ ID NO: 1439 - protein, 226 aa, Triticum aestivum; identical to SEQ ID NO: 1437

SEQ ID NO: 1440 - protein, 226 aa, Triticum aestivum; identical to SEQ ID NO: 1437

SEQ ID NO: 1441 - protein, 226 aa, Triticum aestivum; identical to SEQ ID NO: 1437

SEQ ID NO: 1442 - protein, 226 aa, Triticum aestivum
MGKAELFLRRMVDNSVQPDRVTYTSMIHGYSTLGRWKEATKMFREMTGRGLIPNIVTWNSFMAYLCKHGKSKEATEIFFSMAAKGNKPNIITYGILLHGYGNEESFVDMMSLFNSMKGNGIVANRQVFNILIDAYAKRGLIDEAVLILTEMRGHGLSPDVLPKKGFPPLCIQSNQPNHTEIGAGAEAAQSRPKETTEKEQKKQMPTTADQQKRRSLAIAAPTGIFH

SEQ ID NO: 1443 - protein, 185 aa, Triticum aestivum
MVESGTTVSISTYGIILGELCRNNCTEEAIILFHKLGAMNVKFDITIFNTMIDAMYKVRRREEANILFAAISANGLVPNASTYRIMITNLLKEGSMEEADHMFSSMETSGYAPSSVLLNAIIRMLLEKGEIVKAGNYLSKVDGKSISLEASTSLLMWHLFSTEGKYHEQIKSLPERYRFFGVRHS

SEQ ID NO: 1444 - protein, 185 aa, Triticum aestivum; identical to SEQ ID NO: 1443

SEQ ID NO: 1445 - protein, 185 aa, Triticum aestivum; identical to SEQ ID NO: 1443

SEQ ID NO: 1446 - protein, 185 aa, Triticum aestivum; identical to SEQ ID NO: 1443

SEQ ID NO: 1447 - protein, 185 aa, Triticum aestivum; identical to SEQ ID NO: 1443

SEQ ID NO: 1448 - protein, 185 aa, Triticum aestivum; identical to SEQ ID NO: 1443

SEQ ID NO: 1449 - protein, 185 aa, Triticum aestivum; identical to SEQ ID NO: 1443

SEQ ID NO: 1450 - protein, 221 aa, Triticum aestivum
MPRLRLRRFSTAPMFHLLRRSSSSTSTSPPSRSWSPHAAFAAATECVRAGTLSPEDAHHLFDELLRQATPVPERPLNGFLAALARAPASAACIRDGPALAVALFNRVCREEAGLQVAAPTVCTYNILMDCCCRAHRPDLGLAFFGRFLRTGLKTEQITVSTFLKCLCYAKRTEEAVNVLLHGMSELGCVPNAISYSIVLKSLCKNSMSQRALDLLFQCGGI

SEQ ID NO: 1451 - protein, 221 aa, Triticum aestivum; identical to SEQ ID NO: 1450

SEQ ID NO: 1452 - protein, 221 aa, Triticum aestivum; identical to SEQ ID NO: 1450

SEQ ID NO: 1453 - protein, 178 aa, Triticum aestivum
MDMALRIMPKFNCIPDVFSYNILFKGLCTEKRSQEALELIHVMAEDGGSCQPNVVSYSTVVDGLLKEGEVDKAYSLFCQMLKRRISPNVVTCSSIISVMCKVHAMDKAEQVLQQMFDTRILPNVATYTSLIQGYYSLGHCEEVDWIFKKMSRNGVQPNIVAYKHTDGLSLQERKMRIS

SEQ ID NO: 1454 - protein, 178 aa, Triticum aestivum; identical to SEQ ID NO: 1453

SEQ ID NO: 1455 - protein, 178 aa, Triticum aestivum; identical to SEQ ID NO: 1453

SEQ ID NO: 1456 - protein, 178 aa, Triticum aestivum; identical to SEQ ID NO: 1453

SEQ ID NO: 1457 - protein, 178 aa, Triticum aestivum; identical to SEQ ID NO: 1453

SEQ ID NO: 1458 - protein, 178 aa, Triticum aestivum; identical to SEQ ID NO: 1453

SEQ ID NO: 1459 - protein, 197 aa, Triticum aestivum
MTSTPMRRLLLCRRSSSSSTSTSPPSRPWSPHAAFAAATWTLTPKHAHHLFDELLRQDTPVPERSLDGFLAALTRASSSASCRDGPALALDLFSHLCREEAGPRVAPPTIFTYGVLMNCCCRTRRSQLGLAFFGRLLRTGLKTNTIVFSSLLKCLCHAKWADEAVSVLLHRMSELGCVPDAFSYTIVLKSLCDASSS

SEQ ID NO: 1460 - protein, 197 aa, Triticum aestivum; identical to SEQ ID NO: 1459

SEQ ID NO: 1461 - protein, 197 aa, Triticum aestivum; identical to SEQ ID NO: 1459

SEQ ID NO: 1462 - protein, 197 aa, Triticum aestivum
MTSTPMRRLLLCRRSSSSSTSTSPPSRPWSPHAAFAAATWTLTPKHAHHLFDELLRQDTPVPERSPDGFLADLTRASSSASCRDGPALALDLFSHLCREEAGPRVAPPTIFTYGVLMNCCCRTRRSQLGLAFFGRLLRTGLKTNTIVFSSLLKCLCHAKWTDEAVSVLLHRMSELGCVPDAFSYTIVLKSLCDASSS

SEQ ID NO: 1463 - protein, 197 aa, Triticum aestivum; identical to SEQ ID NO: 1459

SEQ ID NO: 1464 - protein, 197 aa, Triticum aestivum; identical to SEQ ID NO: 1462

SEQ ID NO: 1465 - protein, 221 aa, Triticum aestivum
MSLSGVKPTTIIYNIILDGLFCSGRTGSAKEKFHTMTESGIPVGVDTYNIVLSGLCRNNCTDEAIELFKKLRATNVKIDVMTLNIMISAMFKTRRIEEAKDLFATISAIGLVPSVVTYSVMMTNFIKEGSLAEADDMFLAMEKASCAPNSILLNQVVRALLEKGAVVKAATYLAKLDAKQLSVEASTISLIVSLFSGEGKLREHVELLPVKYQPPESSTDN

SEQ ID NO: 1466 - protein, 221 aa, Triticum aestivum; identical to SEQ ID NO: 1465

SEQ ID NO: 1467 - protein, 221 aa, Triticum aestivum; identical to SEQ ID NO: 1465

SEQ ID NO: 1468 - protein, 221 aa, Triticum aestivum; identical to SEQ ID NO: 1465

SEQ ID NO: 1469 - protein, 167 aa, Triticum aestivum
MYMFDFILGIGQRPDVIMYNSLMDGYCLVGKVEEAVRVLDAMKSAGLQPTTVTYGILLNGYCKIGRIAAGLSLFKEMSLSGVKPITIMYNIILDGLFCSGRTVCAKEKFHTMNESGIPVGVDTYNIVLSGLCKNNCTDEAIELFKELRAKNVKINVMILNTMIFCNV

SEQ ID NO: 1470 - protein, 167 aa, Triticum aestivum
MYMFDFILGIGQRPDVIMYNSLMDGYCLVGKVEEAVRVLDAMKSAGLQPTAVTYGILLNGYCKIGRIAAGLSLFKEMSLSGVKPTTIMYNIILDGLFCSGRTVCAKEKFHTMNESGIPVGVDTYNIVLSGLCKNNCTDEAIELFKELRAKNVKINVMILNTMIFCNV

SEQ ID NO: 1471 - protein, 167 aa, Triticum aestivum; identical to SEQ ID NO: 1470

SEQ ID NO: 1472 - protein, 167 aa, Triticum aestivum; identical to SEQ ID NO: 1470

SEQ ID NO: 1473 - protein, 167 aa, Triticum aestivum
MYMFDFILGIAQRPDVIMYNSLMDGYCLVGKVEEAVRVLDAMKSAGLQPTTVTYGILLNGYCKIGRIAAGLSLFKEMSLSGVKPITIMYNIILDGLFCSGRTVCAKEKFHTMNESGIPVGVDTYNIVLSGLCKNNCTDEAIELFKELRAKNVKINVMILNTMIFCNV

SEQ ID NO: 1474 - protein, 167 aa, Triticum aestivum; identical to SEQ ID NO: 1473

SEQ ID NO: 1475 - protein, 206 aa, Triticum aestivum
MTGRWDPHTLGCATPNSLRCVRTRRPFRTPPRRSLVSDSAIPFLLTSAPRRCPASAAPPPRRSPASTSSATSPPPPPPPPPRRQPHAPGHPMPPLPRPRSVSVPGHSGRKTHTTCSTNCFGRPSRSLNGFLAVLARVPASGVCIRDGPALAVSLFNRVCREEAGPQVARLTVCTYNILMDCCCRARRPELGLALFRRFLRKGLKTD

SEQ ID NO: 1476 - protein, 206 aa, Triticum aestivum; identical to SEQ ID NO: 1475

SEQ ID NO: 1477 - protein, 206 aa, Triticum aestivum; identical to SEQ ID NO: 1475

SEQ ID NO: 1478 - protein, 228 aa, Triticum aestivum
MVSIGEHACPPNSAFLLPNPNSCPGCAGAVGGERHRRPLGPLPLPDSSRSIGGAMSRRAVPAGRRILEQNIKSRYRAGAIGTDDALHLFDELLQVAWPSSIAAINCLLIVVGRDCPALAVSLFNHIARAKVAPHNITYGILVDCCSRAGRWTLASLPWATSLRRDLRQDPLSLSATCSGPSVRRRRPATEWTSCSELCLSLTAYRMFTPTTFFSRASATRREAKRLSS

SEQ ID NO: 1479 - protein, 228 aa, Triticum aestivum; identical to SEQ ID NO: 1478

SEQ ID NO: 1480 - protein, 228 aa, Triticum aestivum; identical to SEQ ID NO: 1478

SEQ ID NO: 1481 - protein, 220 aa, Triticum aestivum
MISTDIKPDTVVYHSLIQGFCTHGDLVKAKELVYEMINKDIPPPTIVLFSSIINSLCKEGRVTDAQDIFNLVIEIGESPDVFAFTSLLDGYCLVGKMEKASQVFDAMVSAGIEPNASTYSVMITNLLKQGLVEEAESMFSSMEKSGCAPDSPLMNDIIRILLEKGEIVKAGDYMSKVDGRSISLEATTTSLLKCLFSSKGKYREQINLLPVKYQFFNGAS

SEQ ID NO: 1482 - protein, 220 aa, Triticum aestivum; identical to SEQ ID NO: 1481

SEQ ID NO: 1483 - protein, 150 aa, Triticum aestivum
MGSGVLPVAHTGGGSGGGTSISLILSWLLCTLPHLYMYWPLTLGKAYLLTYPTIGTGVQPNTVVYHSLVQGLCTHGDLAKAEELVSEMMNKGIARPNKSLASSFLYHYSISGSIRRVGANPAYIRVSICQHISVCDNPAETIRCSCHPSF

SEQ ID NO: 1484 - protein, 150 aa, Triticum aestivum; identical to SEQ ID NO: 1483

SEQ ID NO: 1485 - protein, 150 aa, Triticum aestivum; identical to SEQ ID NO: 1483

SEQ ID NO: 1486 - protein, 224 aa, Triticum aestivum
MVHNGVQPDAVTYNSLIQGYSTLGQLKELVRLLKVMRSQGVLPDVVTYNSLMTCLCKNGRFKEAVEIFYSMAVKGQKPNVVSYSIMLHGYAIQGSLVEMIDLCELMARDGVVPDLHCFNILISAYAKYGRMDVAMLFFEDMLKKGLNPNEFIYLTVISAFCKMGRMDDALEKFNEMIDRGVPLDTKIYVCMIEGYLNHGESVKAEEFITKMKSRDIRHGPRKGN

SEQ ID NO: 1487 - protein, 205 aa, Triticum aestivum
MSRLRLRLPRGSSSSTTVIPRLRLLRRCSSSTSTSPPSRSWSPRDAFAAATQRVRAGTLRPEDAHNLFDELLRQATPVPERSLNGFLAALARAPVSGACIRDGSALAVSLFNRVCREEAGAQVAALTGCTYSILMDCCCRARRPDLGLALFGRFLKKGLKTDQIVASTFLKCLCYAKRTDEAVNVVLHRMSELGCVPNALSTCSR

SEQ ID NO: 1488 - protein, 205 aa, Triticum aestivum; identical to SEQ ID NO: 1487

SEQ ID NO: 1489 - protein, 205 aa, Triticum aestivum; identical to SEQ ID NO: 1487

SEQ ID NO: 1490 - protein, 205 aa, Triticum aestivum; identical to SEQ ID NO: 1487

SEQ ID NO: 1491 - protein, 196 aa, Triticum aestivum
MFHQMIKSGITVPVSIYTIILRGLCKNNCAGEAITMFQELRAMNVKFDIITLNTMINAMYKVQRREEAKGLFAAISASGLMPDAYTYNVMINNLLKEGSVEEVDNMFSLMEKSGCAPSSHLVNDIIRRLLEKGEIAKAGNYLSKVDGKIISLEDSTISLLSSLFSSKGKYRENIKLLPANYHFLDGFSGIAHETNS

SEQ ID NO: 1492 - protein, 196 aa, Triticum aestivum; identical to SEQ ID NO: 1491

SEQ ID NO: 1493 - protein, 196 aa, Triticum aestivum; identical to SEQ ID NO: 1491

SEQ ID NO: 1494 - protein, 196 aa, Triticum aestivum; identical to SEQ ID NO: 1491

SEQ ID NO: 1495 - protein, 196 aa, Triticum aestivum; identical to SEQ ID NO: 1491

SEQ ID NO: 1496 - protein, 196 aa, Triticum aestivum; identical to SEQ ID NO: 1491

SEQ ID NO: 1497 - protein, 187 aa, Triticum aestivum
MVESGVSVCIDTYSIVLGGLCRNNCSGEAIMLFQKLSTMDVKFNIIIVNIMIDAFYKVQRNQEAKDLFAAVSANGLVANVFTYTIMMKNLIKEGSVEEADDLFLSMEKSGCTADSYMLNLIVRMLLEKGELVKAGNYMSKVDAKSYSLEAETVSLLISLFSGKGKYREHIGLLPTKYQFREEAAAVE

SEQ ID NO: 1498 - protein, 212 aa, Triticum aestivum
MSRRYTITLISRLRVPRRCSSSTSISPPSRSWSPRDAFAAATERVRAGTLSPEDAHNLFDELLRQGTPVPERSLNGFLAALTRATSSNACIKDGPALALALFTRGCREEAGPQVAVPTVWTYNILMDCCCRARRPDLGLALFGCILRTGLKIDQITANTLLKCLCYAKRTEEAVYVLLHSMSKLGCVPDAFAYNIVLKSLCVLGKQLVFPWP

SEQ ID NO: 1499 - protein, 212 aa, Triticum aestivum; identical to SEQ ID NO: 1498

SEQ ID NO: 1500 - protein, 212 aa, Triticum aestivum; identical to SEQ ID NO: 1498

SEQ ID NO: 1501 - protein, 212 aa, Triticum aestivum; identical to SEQ ID NO: 1498

SEQ ID NO: 1502 - protein, 211 aa, Triticum aestivum
MSRRYTITLISRLRVPRRCSSSTSISPPSRSWSPRDAFAAATERVRAGTLSPEDAHNLFDELLRQGTPVPERSLNGFLAALTRATSSNACIKDGPALALALFTRGCREEAGPQVAVPTVWTYNILMDCCCRARRPDLGLALFGCILRTGLKIDQITANTLLKCLCYAKRTEEAVYVLLHSMSKLGCVPDAFAYNIVLKSLCVLGKLVFPWP

SEQ ID NO: 1503 - protein, 211 aa, Triticum aestivum; identical to SEQ ID NO: 1502

SEQ ID NO: 1504 - protein, 223 aa, Triticum aestivum
MSRLQPRSFSSSASSRANELLDEFKYHLGSGTLWPELAHQLLDELQRQPVPVSARALNGLFAALADAPPSANCTDGPALAINLFNRHRISPDIYTYNILIECCHRACRPDLGPAFFGRLLKTGVTMSVITYSSYGESFGVDPLPSASSSSYGESFCSPGLGVDGTLVSCSFLKAAAGNSSWWRGCWWRGGFGLLLGAAPCFAGPADGFFGGAVLHPFIDGDGS

SEQ ID NO: 1505 - protein, 223 aa, Triticum aestivum; identical to SEQ ID NO: 1504

SEQ ID NO: 1506 - protein, 223 aa, Triticum aestivum; identical to SEQ ID NO: 1504

SEQ ID NO: 1507 - protein, 223 aa, Triticum aestivum
MSRLQPRSFSSSASSRANELLDEFKYHLGSGTLWPELAHQLLDELQRQPVPVSARALNGLFAALADAPPSANCTDGPALAINLFNRHRISPDIYTYNILIECCHRACRPDLGPAFFGRLLKTGVTMSVITYSSYGESFGVDPLPSASSSSYGESFCSPGLDVDGTLVSCSFLKAAAGNSSWWRGCWWRGGFGLLLGAAPCFAGPADGFFGGAVLHPFIDGDGS

SEQ ID NO: 1508 - protein, 89 aa, Triticum aestivum
MNCCCRVRRPDLGLAYFGRLLRTGLKTNEVVASTVLKCLCFAKRTDEAVDVLLHRTSVLGCVPNSFSYNIVLKSLCETAGASKRSACSR

SEQ ID NO: 1509 - protein, 220 aa, Triticum aestivum
MPRVRPGSSSGTVSSHANQLLNKLKDHVGSGTLQPERAHQLFDKLLRQAVPISACALNGLFAALARALPSAACTDGPALAIALFNRMAREGRWVIAPNMYTYTILIDCSCRSRRPDLGPAFFGRLLKTGITADVCTFSSLFKCLCDMKRIDEAVGVLLHRMPGDMPDVISYSTILKGFCNEGRSQLALDLLQMMVKKGAGQSPDVVSYNMVINGFFKEVK

SEQ ID NO: 1510 - protein, 220 aa, Triticum aestivum; identical to SEQ ID NO: 1509

SEQ ID NO: 1511 - protein, 220 aa, Triticum aestivum; identical to SEQ ID NO: 1509

SEQ ID NO: 1512 - protein, 220 aa, Triticum aestivum; identical to SEQ ID NO: 1509

SEQ ID NO: 1513 - protein, 220 aa, Triticum aestivum; identical to SEQ ID NO: 1509

SEQ ID NO: 1514 - protein, 220 aa, Triticum aestivum; identical to SEQ ID NO: 1509

SEQ ID NO: 1515 - protein, 196 aa, Triticum aestivum
MTRLYSTTACARRVRIRCCCRLSSTTSPPSRTWSPRAAFAVATEHVRAGTLSRPDAHRLFGELLRRDTPVPSRSLNGLLPVLARSTSSAYVPRHRWARPRRRPLQPHAPSGSRPACGASRSVHLLMDCCCRARRPDLGLAFLGRLLRTGLKTDQVVANNFLKCLCYAKRTDEDVDVLLHRMPDLGCVPNAVSCNIQ

SEQ ID NO: 1516 - protein, 209 aa, Triticum aestivum
MSRNGVEPTMITYNIQMDYLCKSGRCIEARKMFDSMVSLGQKPTVTTYNILLHGYAMERSFHDMNCLIELMDYNGIKPDHYGYNKLISSSAKKEMVGEVLHIFTKMRQQGLNPNVVNYGTVINLLSSIGRMDDAMSQFNQMITEGLAPDIIVSTPLLVVSVLVANGRRFMNYFLRCWIAASVQTQCSSTLLWITFAKMEGLWKPKMCST

SEQ ID NO: 1517 - protein, 209 aa, Triticum aestivum; identical to SEQ ID NO: 1516

SEQ ID NO: 1518 - protein, 209 aa, Triticum aestivum; identical to SEQ ID NO: 1516

SEQ ID NO: 1519 - protein, 208 aa, Triticum aestivum
MYKIILDGLFCSGRTVCAKEKFNTMTESGIPVGVDTYNIVLSGLCRNNCTDEAIELFKKLRATNVKIDVITFNTMISAMFKTRRIEEAKDLFATISAIGLVPSVVTYSVMMTNFIKEGLLAEADDMFLTMEKASCAPNSSLLNQVVRALLEKGAVVKAATYLAKLDAKQLSVEASTISLIVSLFSREGKLREHVELLPVKYQPPEMSV

SEQ ID NO: 1520 - protein, 214 aa, Triticum aestivum
MPRARPGSSSSSVSSRADQLLNKLKDHLGPRTLQPERAHQLFDKLLRQTVPVSAFALNGLFAVLARALPSAACTDGPALAIALFNRMNREGHQVIAPTNHAYNILIDCCCRSRFPGLGPAFFGRLLKTGIKANIITFHSLFKCQCDIKQMEEALNRLLYRIPELPDSISYSIIIKSLCDNGRSQCALDLLRMKAKKGADHYPEVVAYNRVEPMA

SEQ ID NO: 1521 - protein, 214 aa, Triticum aestivum
MPRARPGSSSSSVSSRADQLLNKLKDHLGPRTLQPERAHQLFDKLLRQTVPVSAFALNGLFAVLARALPSAACTDGPALAIALFNRMNREGHQVIAPTNHAYNILIDCCCRSRFPGLGPAFFGRLLKTGIKANIITFHSLFKCQCDIKQMEEALNRLLYRIPELPDSISYSIIIKSLCDNGRSQCALDLLRMKAKKGADHYPEVVAYNREEPMA

SEQ ID NO: 1522 - protein, 214 aa, Triticum aestivum; identical to SEQ ID NO: 1521

SEQ ID NO: 1523 - protein, 214 aa, Triticum aestivum; identical to SEQ ID NO: 1521

SEQ ID NO: 1524 - protein, 214 aa, Triticum aestivum; identical to SEQ ID NO: 1521

SEQ ID NO: 1525 - protein, 214 aa, Triticum aestivum; identical to SEQ ID NO: 1521

SEQ ID NO: 1526 - protein, 189 aa, Triticum aestivum
MSPLRLRPRLRPRLHARRSYSTSHPPRSQGWDPHAAFAAATERARSGNLTSKDAHHLFDQLLLQANPVNMRPPNDLLTALARAPASAACSNGPALAVALFSRLSQGARQRVVQPTACTHGILMDCCCRANRQDLALAFFGRLLRTGLKAGVIEVNTLLKGLCRAKRADEALDILLHRMPELGCTPDVVA

SEQ ID NO: 1527 - protein, 189 aa, Triticum aestivum; identical to SEQ ID NO: 1526

SEQ ID NO: 1528 - protein, 178 aa, Triticum aestivum
MIDTGVRQGTSVYGSLIQGFCTHGDLVKGKELVTEMMNKGIPPPDIKFFHSIMQNLCTEGRVIEARDILDLIAQIGMRPDVCTFNLLIGGYFLVRKIEHTSKIFDDMVSYGLKPCNITYGILINGYCKNGRIDHGLILFKDMLRKGLKPTTFNYSPSPLASPPWNSLNSKIFYILYLY

SEQ ID NO: 1529 - protein, 192 aa, Triticum aestivum
MDKAEVVLRQMVGNGVRPDIFTYTSLIHGYSISGQFEEVVRLLEKMRSQGVKPTVFTCNTVMDYLCKHGRIKEAAEFFYSMAEKGHKPNTVSYAIMLHGYAKEGSLVDMTNLCELMAGDGIIPNICIFNILISAYAKCGIMDVAMLFFEDMLKQGVNPDEVTYLAMIAGYCSMGSIVLVSLTCAKISEYNRS

SEQ ID NO: 1530 - protein, 192 aa, Triticum aestivum; identical to SEQ ID NO: 1529

SEQ ID NO: 1531 - protein, 192 aa, Triticum aestivum; identical to SEQ ID NO: 1529

SEQ ID NO: 1532 - protein, 192 aa, Triticum aestivum; identical to SEQ ID NO: 1529

SEQ ID NO: 1533 - protein, 192 aa, Triticum aestivum; identical to SEQ ID NO: 1529

SEQ ID NO: 1534 - protein, 192 aa, Triticum aestivum; identical to SEQ ID NO: 1529

SEQ ID NO: 1535 - protein, 185 aa, Triticum aestivum
MSPLRLRLRLHARHSSSASQPSRRQGWDPHAAFAAATECARSGNLTPEDAHHLFNELLRQGNPVLGRPLNNLLAALARAPASSACRDGPALAVALFSRISQGARLRVLHPTACTYGILMDCCCRANRQDLALAFFGRLLRTGLKAGVIEVNTLLKGLCRAKRADEALDILLHRMPELGCTPDVVA

SEQ ID NO: 1536 - protein, 185 aa, Triticum aestivum; identical to SEQ ID NO: 1535

SEQ ID NO: 1537 - protein, 185 aa, Triticum aestivum; identical to SEQ ID NO: 1535

SEQ ID NO: 1538 - protein, 185 aa, Triticum aestivum; identical to SEQ ID NO: 1535

SEQ ID NO: 1539 - protein, 202 aa, Triticum aestivum
MPRFSSSTPMSPARLRLLRLCARHSSSTSHPSRIWDPHAAFAAATQRARSGTLTTEDAHHLFDELLRQGNHVQERPLNNFLAALARAPASPFCSDGPALAVALFGRLSRGAGRRVAQPNVFTYGVLMDCCCRARRLDLAIAFFARLLKTGLEAGQVVFGTLLKGLCHAKRSDEALDVLLHRMPELGCIPTKYQFLEEAATVE

SEQ ID NO: 1540 - protein, 202 aa, Triticum aestivum; identical to SEQ ID NO: 1539

SEQ ID NO: 1541 - protein, 206 aa, Triticum aestivum
MTDLCELMARDGIVPYLHCFSILINAYAKCGMIDVAILFFKDMLKQGVNPDEVTYLAVIAGYCRVGMMDDAMEKFNEMIDMGVPHNATVYRCMIQGYLNHGDFLKAKELITEMKTKGIHPRCGKAKELIQGSSGSVDNIPVARGLHYTKISMMDKHCTSKTKTSKLFVGAMTPMTPPLDPPLTQGTSCHNSFTGACSRVVFIMVIT

SEQ ID NO: 1542 - protein, 206 aa, Triticum aestivum; identical to SEQ ID NO: 1541

SEQ ID NO: 1543 - protein, 206 aa, Triticum aestivum; identical to SEQ ID NO: 1541

SEQ ID NO: 1544 - protein, 206 aa, Triticum aestivum; identical to SEQ ID NO: 1541

SEQ ID NO: 1545 - protein, 206 aa, Triticum aestivum; identical to SEQ ID NO: 1541

SEQ ID NO: 1546 - protein, 206 aa, Triticum aestivum; identical to SEQ ID NO: 1541

SEQ ID NO: 1547 - protein, 187 aa, Triticum aestivum
MLDRSICPDRVFFNTDMDHLCKSGRVMEAQDIFDLMVHMGVKPFVRDYNTLIHGYCLVGKMDEGRKLLDNMCSIGLKPDDFTYSILIDGYSMKGRIDDALIVVREMLDGKVKPSIITINIMIGALLKGGRKEEAKDLFDGIWAKGLVPNVVTYSLMIQKLIEEGSLQESDDLFLLWRRMDVLPTPVH

SEQ ID NO: 1548 - protein, 187 aa, Triticum aestivum; identical to SEQ ID NO: 1547

SEQ ID NO: 1549 - protein, 161 aa, Triticum aestivum
MFQELGAMNVKFDIITLNTMINAMYKVQRREEAKGLFAAISASGLVPDAYTYNVMINNLLKEGSVEEVDNMFSLMEKSGCAPSSHLVNDITRRLLGKGEIAKAGNYLSKVDGKIISLEDSTTSLLSSLFSSKGKYRENIKLLPANYHVLDGFSRIAHENNS

SEQ ID NO: 1550 - protein, 161 aa, Triticum aestivum; identical to SEQ ID NO: 1549

SEQ ID NO: 1551 - protein, 211 aa, Triticum aestivum
MIMVFHQIIMATTYSYLLMLKKKMVDDVLHIFTKMRQQGLNPDVANYGAVINLLSSIGRMDDAMSQYNQMINEGLAPDIIVFNSLISGFYSCGKWEKVHELFSEMLDRGICPNTVFLNTIMDRLCKNERVMEAQDLFDLMVHMGVKPDVCTYSTLIGGYLFVGKMDEVSKLLDNMVSIGMEPDVITYNILMHLIYLIYIHLVCYVPWTYLI

SEQ ID NO: 1552 - protein, 158 aa, Triticum aestivum
MVDNGVRPDNVTYNSLIHGYSSSGHWKDMVRLFKEMKNRSVTPDVCTYNLLMNSLRKNGKTKDAAENFDSMAMKGLKPDTISYAIILHGYATEGCLVDMINLFNSMATDCILPDCDIFNILIDAYAKSGKLDKAMLMFKEMQKQGVSPELQMQSHIQP

SEQ ID NO: 1553 - protein, 208 aa, Triticum aestivum
MRYTVSSFIQLARQLFDEMLRQPVPISARALNGLFAALARAPPSTACTDGPALAVDLFNHMARAGRRWMTGPTVHTYNILIDCCHRACRPDLGPAFFGCLLKTGIIMSAITYSSLFKCLCDMRRTKEALNVLLHRMPDNLPNVISYSVILKSFCDSGRSQLALDLLRVMAKKGGDHSPDVMAYNMVSKACDLFHEMIQQGVVPNEGDI

SEQ ID NO: 1554 - protein, 195 aa, Triticum aestivum
MDEVSKLLENMCSIGLKLDVVTYSILIDGYSKNGRIDDALVVFREMMDGKVEPSVITFNIMIGALLKGGRKEEATDLFNGIWPKGLVPDVVTYSLMIQKLIEEGSLQESDDLFLSMEKNGCAANSHMLNAIVRSLLQKGEIPRAGTYLSKIDERRFTFEASTASLLAALASGGKGQEYKELLPEKYHYFLEQGAD

SEQ ID NO: 1555 - DNA, 2949 bp, Triticum aestivum
atgcttacaaatatcgggatacttaaaaaaataataccattttatggcttctgtggcgcgttttctagggcttgcaacaaatttatattcttggtcgatataaagttctattcttacagactgggtgatacgaatatccatatcataattttattgtacctgaaaagaactcatatattatctctgtatcaaaatattggacgtttgtacacctggaaaagcactcgtcttgctccgatttcacgacctaccaccaccaaggccatgcctcgcttctcctccaccacgcccatgtcgccactccgcctccgcctccgccgccgcctccgcgcccgccactcctcctccacctcccattcctcacgcagctgggagccccacgccgccttcgccgccgccacggagcgtgcgcgctctggcaacctcaccccggaggacgcacaccacctgttcgacgaattgctccggcagggcaatcctgtccaggaccgccccttgaacaaacttctctctgccctcgcccgtgctccggcgtccgcggcctgcagaaacggccctgcactcgcggttgctctcttcagccgcatatcccaaggtgctcgccgacgggtggcggagccaacggcctgcacctacaccatcctcatggactgttgctgccgcgcacaccgcctggatctggcgctcgccttcttcggccgtctcctcaggacgggactgaagacgggcgtcatagaagtcaacaccctcctcaaaggactctgtcactcaaagcgcgcggatgaggccatggaagtgcttcttcacaggatgcctgagctgggctgcacccctgacgtggtggcgtgtaacacggtcatccatggcttcttcaaggaaggccaagtaggcaaggcgtgcaatctgtttcatgaaatggggcagcacggcgttacacctgatgtggtgacatataactcggttatcgatgggctgtgcaaggccagagccatggacaaggcagaggtggtccttcatcagatgcttgttaatggtgtcgtacctgataaggtgacatatggcagcctcatcgatggatattactctttggcccattggaaggaggcagttaggctgttcgaggaaatgaaaagtcagagggttacaccagatgtgcatacttacaacttgtgtatccatggcttctttagggaaggccaagtaggcaaggcgtgcaatctattccatgaaatggggcagcagggcgttacacctgatgtggtgacatataattcggttatcgatgcgctgtgcaaggccagagcaatggacaaggcggagtatttccttcgtcagatggttgatagtggtgtcgtacctaataatgtgacatataatagcctcatccatggatattcctcttcaggctatcagaaggaggcggttagggtgctgaaagaaatgacaagtcagggtatcataccagatgtttttactttcaactcgcttatggcctccctttccaagaatggaagaagcaaagaagctgcagaaatttttgactccatggccatgaagggcctgaaacctgatatcgtctcgtacaatactctgcttcacgggtatgccaccgaaggatgcttagttggtatgactaatttctttaattcaatgactagagatggtattcggcctaactgtcacactttgaacatactgattaatgcatatgctaaatctggcatgatggatgaggctatggttatatttaaaggaatgcggaaacagggagtgagtccagatgtagtcacctattcaaccgtaatacatggattttgcaaaatcggtaggttggacaatgctatggtaaaatttaagcagatgactgatatgggagtacgaccgaatccaattgtttatcattccctaatccagggtttttgtacacatggggatttagtgaaagcaaaggaattggttactgaaatgaggtacaaaggtatgcgtcctcctgatattaaggtcttccatttggcaatgcagaacctatgcacggaaggaagagtaacaaaagcacgggatatccttgacttgattgtgcacataggtatgaggcctgatgttttcacatttagtttactgatcggtggatactgcttagtctgcaagatggaggatgcatcaaaaatatttgatgatatggtgtcatatggtttagaaccttctaatattacatatggtatacttattaatggctattgcaaaaacaaaaggattgacgatgggctgattctattcaaaacaatgttgcacaagggacttaaacctacaacttttaattataacgtcatactggatggattatttctggctggacgaacagttgctgcaaaagagaagtttaatgagatggttgaatctggagtaagtgtgtgcattgatacatgctctatagttcttggtggactttgtaaaaatagctgcagcagcgaagcgatcaccctgttccggaaattaagcacaatgaatgtgaaatttgatattaatattgtcaatatcattattggtgcattctacagtgtcaagagaaaccaagaggctaaggatttgtttgctgctataccagccaatggcttggttcctaatgctgttacctacaccataatgatgacaaatcttataaaagaaggttcagtggaagaagccgacaatctttttttatcaatggagaagagcggctgtactgcaaactcttggatgttaaatcatattatcagaaggttactggaaagaggagagatagtcaaggctggaaattatatgtctaaagttgatgtaaagagctactcacttgaagctaaaactgtttcactgctgatctctctgttttcaagggaagggaaatatagagaccacatcaaattgctccctacaaagtatcagtttctggaagaagcagccacagttgaa

SEQ ID NO: 1556 - DNA, 1320 bp, Triticum aestivum
atgactaatctctttaattcaatgactagagatggtattcggcctaactgtcacactttgaacatactgattaatgcatatgctaaatctggcatgatggatgaggctatgcttatatttaaaggaatgcggaaacagggagtgagtccaaatgtagtcacctattcaaccgtaatacatgggttttgcaaaatcggtaagttggacaatgctatggtaaaatttaagcagatgactgatatgggagtacgaccgaatccaattgtttatcattccctaatccaggggttttgtacacatggggatttagtgaaagcaaaggaattggttactgaaatgaggtacaaaggtatgcgtcctcctgatattaaggtcttccatttggcaatgcagaacctatgcacggaaggaagagtaacaaaagcacgggatatccttgacttgattgtgcacataggtatgaggcctgatgttttcacatttagtatactgatcggtggatactgcttagtctgcaagatggaggatgcatcaaaaatatttgatgatatggtgtcatatggtttagaaccttctaatattacatatggtatacttattaatggctattgcaaaaacaaaaggattgacgatgggctgattctattcaaaacaatgttgcacaagggacttaaacctacaacttttaattataacgtcatactggatggattatttctggctggacgaacagttgctgcaaaagagaagtttaatgagatggttgaatctggagtaagtgtgtgcattgatacatgctctatagttcttggtggactttgtaaaaatagctgcagcagcgaagcgatcaccctgttccggaaattaagcacaatgaatgtgaaatttgatattaatattgtcaatatcattattggtgcattctacagggtcaagagaaaccaagaggctaaggatttgtttgctgctataccagccaatggcttggttcctaatgctgttacctacaccataatgatgacaaatcttataaaagaaggttcagtggaagaagccgacaatctttttttatcaatggagaagagcggctgtactgcaaactcttggatgttaaatcatattatcagaaggttactggaaagaggagagatagtcaaggctggaaattatatgtctaaagttgatgtaaagagctactcacttgaagctaaaactgtttcattgctgatctctctgttttcaagggaagggaaatatagagaccacatcaaattgctccctacaaagtttcagtttctggaagaagcagccacagttgaa

SEQ ID NO: 1557 - DNA, 2751 bp, Triticum aestivum
atgcggtcttgtttctgcaatagagcgtttatcgcgggatgtaacgagtgggcatgtggggcgtggacgctacatcggacggctatcagctcatgcatccaacgatcgtcgaggcgacggtctaaacatcggccgggcgatttattacaagttactaggaccactattttgggacggaggagggaatatgtatttgtgataaaaaaaaaaagagtggtatacctccacaagcaaagcaataccggatcctcctccaaacggctgaccagtccagtcccgtcccgcctcccccgccgctcgccgatgtccagcctccacctcctccgccaccgctcctcctccttcactcccacctcgccgccctcaccctcctggtctccgcacgccgcctttaccgctgccacagagcgcgtccgcgccgggacgctcagcccggaagacgcacaccacctgttcgaccaattgctacagcagtccactccggtccccgagcaagccctgaacggcttccttgccgccctcacccgtgcccgtgcgccagacaccgaagtctgcagagacggcccctcccttgccctcacgctcttcaaccgcgtatggcgagaagaagccggccggcgggtggcgctgcccacagtccgcacctacaacattctgatgaactgctgctgccgcgtgcgtcgtccggacctagggcttgcctacttcgggcgcctcctaaggaccagcctcaaaacaaatgaggtcgtcgccaacaccgtcctcatgtgcctctgctgcgcgaaacggacagatgaagcagtaaacgtgctgcttcataggatgtctgtgctcggctgtgtgcctgatgagttctcatataacatagttctgaagagcttatgcaaagagggaaggagccagcaagcgctcaacctgctccatgtgatggcaaaaggagatggttgctcccccgacgtggtggcttataacacggtcatctatggcttctttaaggaaggtgaagtaggcaaggcatgcaatctattccatgaaatgatgcggcaaggggttgtgcctgatgtggtgacgtatagctcgattatcgatgcactgtgcaaggctggagcaatggacaaggcagagttgttccttcggcagatggttgataacagtgttcagccggatacggtgacatatactagcatgatccatggatattccactttgggccgctggaaagaggcgactaaaatgttaagagaaatgacaagcaggggccttataccaaatattgtcacttggaactcgttcatggcctccctttgcaagcatggaaaaagcaaagaagctgcagaaattttcttttccatggctgcaaggggccacaagcctgatatcgtctcctacactactcttcttcatgggtatgccaatgaaggaagctttgctgatatgatgaaactctttaattcaatggtaggcaacggtattgtagccaactgccaagttttcaacatattaattgatgcatatgctcaacgaggaatgatggacgaagctatgctcatatttactgaaatgccaggacaaggagtcaatccaaatgtagtcacctattcaattgtgatagctgcactttgcagaatgggtaggctggctgatgcaatgaataagttcagtgagatgattggtacgggagtacaaccgaacatagttgtttatcactccctagttcagggcttatgtacacatggtgatttggtgaaagcgaaggtgttgatttctgaaatgatgaataaaggtattgctcgtccaaacattgcattcttcagttcaataatgggcagtctatgcaacgaaggaaggattatgaatgcacatgatatctttgacttggttacagacataggtgtgaaacctgatgttataacatttaatatgctgatggtcggatattgcttagttggcgagatggagaaagcattcaaggtacttgatgccatggtatcagttggcattgagcctgatgttgttacttatagctcacttattagtggctattgtaagactggaaggctcgacgatggtgttacactattcagagaaatgttgcataagagaattaaacctgacactgtttcctataacaccatactggatgggttatttaatgctgggagaactgctgctgcaaggaaaatgttccatgagatgatcgaaagtggagtaatggtgagcatttctacatataatataattcttggaggactttgtagaaataattgcatggatgaagcgatcgtcctattccggaaattacgtgcagtgaatgtgaagttcaatatcacaacactcaataccatcatcaatgcattatacaatgttcaaagaagagaagaagctcatgatttgtttgctgcattaccagccagccggctggtgcctaatgcttctacttacagagtaatgatagataatcttctaaaagaaggagcagtggaagaagctgacagtatgttctcatcaatggagaagagtggttgtgctcctagctctcattttttaaattatatcatcagaatgttattggaaaaaggggagatagtcaaggccggaaaatatatgtctaaagttgatgggaagattattttgcttgaagcttcaactacttcattgctgatgtccctcttctcaaggggaggcaaataccaggagcacatactcttgctccctgcaaaatatcattttttcagtggagtgaaccacagt

SEQ ID NO: 1558 - DNA, 2448 bp, Triticum aestivum
atgtccagcctccacctcctccgccaccgctcctcctccttcactcccacctcgccgccctcaccctcctggtctccgcacgccgcctttaccgctgccacagagcgcgtccgcgccgggacgctcagcccggaagacgcacaccacctgttcgaccaattgctacagcagtccactccggtccccgagcaagccctgaacggcttccttgccgccctcacccgtgcccgtgcgccagacaccgacgtctgcagagacggcccctcccttgccctcacgctcttcaaccgcgtatggcgagaagaagccggccggcgggtggcgctgcccacagtccgcacctacaacattctgatgaactgctgctgccgcgtgcgtcgtccggacctagggcttgcctacttcgggcgcctcctaaggaccagcctcaaaacaaatgaggtcgtcgccaacaccgtcctcatgtgcctctgctgcgcgaaacggacagatgaagcagtaaacgtgctgcttcataggatgtctgtgctcggctgtgtgcctgatgagttctcatataacatagttctgaagagcttatgcaaagagggaaggagccagcaagcgctcaacctgctccatgtgatggcaaaaggagatggttgctcccccgacgtggtggcttataacacggtcatctatggcttctttaaggaaggtgaagtaggcaaggcatgcaatctattccatgaaatgatgcggcaaggggttgtgcctgatgtggtgacgtatagctcgattatcgatgcactgtgcaaggctggagcaatggacaaggcagagttgttccttcggcagatggttgataacagtgttcagccggatacggtgacatatactagcatgatccatggatattccactttgggccgctggaaagaggcgactaaaatgttaagagaaatgacaagcaggggccttataccaaatattgtcacttggaactcgttcatggcctccctttgcaagcatggaaaaagcaaagaagctgcagaaattttcttttccatggctgcaaggggccacaagcctgatatcgtctcctacactactcttcttcatgggtatgccaatgaaggaagctttgctgatatgatgaaactctttaattcaatggtaggcaacggtattgtagccaactgccaagttttcaacatattaattgatgcatatgctcaacgaggaatgatggacgaagctatgctcatatttactgaaatgccaggacaaggagtcaatccaaatgtagtcacctattcaattgtgatagcttcactttgcagaatgggtaggctggctgatgcaatgaataagttcagtgagatgattggtacgggagtacaaccgaacatagttgtttatcactccctagttcagggcttatgtacacatggtgatttggtgaaagcgaaggtgttgatttctgaaatgatgaataaaggtattactcgtccaaacattgcattcttcagttcaataatgggcagtctatgcaacgaaggaaggattatgaatgcacatgatatctttgacttggttacagacataggtgtgaaacctgatgttataacatttaatatgctgatggtcggatattgcttagttggcgagatggagaaagcattcaaggtacttgatgccatggtatcagttggcattgagcctgatgttgttacttatagctcacttattagtggctattgtaagactggaaggctcgacgatggtgttacactattcagagaaatgttgcataagagaattaaacctgacactgtttcctataacaccatactggatgggttatttaatgctgggagaactgctgctgcaaagaaaatgttccatgagatgatcgaaagtggagtaatggtgagcatttctacatataatataattcttggaggactttgtagaaataattgcatggatgaagcgatcgtcctattccggaaattacgtgcagtgaatgtgaagttcaatatcacaacactcaataccatcatcaatgcattatacaatgttcaaagaagagaagaagctcatgatttgtttgctgcattaccagccagccggctggtgcctaatgcttctacttacagagtaatgatagataatcttctaaaagaaggagcagtggaagaagctgacagtatgttctcatcaatggagaagagtggttgtgctcctagctctcattttttaaattatatcatcagaatgttattggaaaaaggggagatagtcaaggccggaaaatatatgtctaaagttgatgggaagattattttgcttgaagcttcaactacttcattgctgatgtccctcttctcaaggggaggcaaataccaggagcacatactcttgctccctgcaaaatatcattttttcagtggagtgaaccacagt

SEQ ID NO: 1559 - DNA, 2904 bp, Triticum aestivum
atggcggcggcgccgcgcgggttgcagctctgtcggagccgggggcaagagtatgttgtttctgtaacagagcgtttgttgcgggaaataacgagtgggcatgcggtcttgttttctgcaacagaacgtttgttgcgggaagtacgagtgggcatgcggtcttgtttctgcaatagagcgtttatcgcgggatgtaacgagtgggcatgtggggcgtggacgctacatcggacggctatcagctcatgcatccaacgatcgtcgaggcgacggtctaaacatcggccgggcgatttattacaagttactaggaccactattttgggacggaggagggaatatgtatttgtgataaaaaaaaaaagagtggtatacctccacaagcaaagcaataccggatcctcctccaaacggctgaccagtccagtcccgtcccgcctcccccgccgctcgccgatgtccagcctccacctcctccgccaccgctcctcctccttcactcccacctcgccgccctcaccctcctggtctccgcacgccgcctttaccgctgccacagagcgcgtccgcgccgggacgctcagcccggaagacgcacaccacctgttcgaccaattgctacagcagtccactccggtccccgagcaagccctgaacggcttccttgccgccctcacccgtgcccgtgcgccagacaccgaagtctgcagagacggcccctcccttgccctcacgctcttcaaccgcgtatggcgagaagaagccggccggcgggtggcgctgcccacagtccgcacctacaacattctgatgaactgctgctgccgcgtgcgtcgtccggacctagggcttgcctacttcgggcgcctcctaaggaccagcctcaaaacaaatgaggtcgtcgccaacaccgtcctcatgtgcctctgctgcgcgaaacggacagatgaagcagtaaacgtgctgcttcataggatgtctgtgctcggctgtgtgcctgatgagttctcatataacatagttctgaagagcttatgcaaagagggaaggagccagcaagcgctcaacctgctccatgtgatggcaaaaggagatggttgctcccccgacgtggtggcttataacacggtcatctatggcttctttaaggaaggtgaagtaggcaaggcatgcaatctattccatgaaatgatgcggcaaggggttgtgcctgatgtggtgacgtatagctcgattatcgatgcactgtgcaaggctggagcaatggacaaggcagagttgttccttcggcagatggttgataacagtgttcagccggatacggtgacatatactagcatgatccatggatattccactttgggccgctggaaagaggcgactaaaatgttaagagaaatgacaagcaggggccttataccaaatattgtcacttggaactcgttcatggcctccctttgcaagcatggaaaaagcaaagaagctgcagaaattttcttttccatggctgcaaggggccacaagcctgatatcgtctcctacactactcttcttcatgggtatgccaatgaaggaagctttgctgatatgatgaaactctttaattcaatggtaggcaacggtattgtagccaactgccaagttttcaacatattaattgatgcatatgctcaacgaggaatgatggacgaagctatgctcatatttactgaaatgccaggacaaggagtcaatccaaatgtagtcacctattcaattgtgatagctgcactttgcagaatgggtaggctggctgatgcaatgaataagttcagtgagatgattggtacgggagtacaaccgaacatagttgtttatcactccctagttcagggcttatgtacacatggtgatttggtgaaagcgaaggtgttgatttctgaaatgatgaataaaggtattgctcgtccaaacattgcattcttcagttcaataatgggcagtctatgcaacgaaggaaggattatgaatgcacatgatatctttgacttggttacagacataggtgtgaaacctgatgttataacatttaatatgctgatggtcggatattgcttagttggcgagatggagaaagcattcaaggtacttgatgccatggtatcagttggcattgagcctgatgttgttacttatagctcacttattagtggctattgtaagactggaaggctcgacgatggtgttacactattcagagaaatgttgcataagagaattaaacctgacactgtttcctataacaccatactggatgggttatttaatgctgggagaactgctgctgcaaggaaaatgttccatgagatgatcgaaagtggagtaatggtgagcatttctacatataatataattcttggaggactttgtagaaataattgcatggatgaagcgatcgtcctattccggaaattacgtgcagtgaatgtgaagttcaatatcacaacactcaataccatcatcaatgcattatacaatgttcaaagaagagaagaagctcatgatttgtttgctgcattaccagccagccggctggtgcctaatgcttctacttacagagtaatgatagataatcttctaaaagaaggagcagtggaagaagctgacagtatgttctcatcaatggagaagagtggttgtgctcctagctctcattttttaaattatatcatcagaatgttattggaaaaaggggagatagtcaaggccggaaaatatatgtctaaagttgatgggaagattattttgcttgaagcttcaactacttcattgctgatgtccctcttctcaaggggaggcaaataccaggagcacatactcttgctccctgcaaaatatcattttttcagtggagtgaaccacagt

SEQ ID NO: 1560 - DNA, 2751 bp, Triticum aestivum
atgcggtcttgtttctgcaacagagcgtttatcgcgggatgtaacgagtgggcatgtggggcgtggacgctacatcggacggctatcagctcgggcatccaacgatcgtcgaggcgacggtataaacatcagccgggcgatttattacaagttactaggaccactattttgggacggaggagggaatatgtatttgtgataaaaaaaaaaagagtggtatacctccacaagcaaagcaataccggatcctcctccaaacggctgaccagtccagtcccgtcccgcctcccccgccgctcgccgatgtccagcctccacctcctccgccaccgctcctcctccttcactcccacctcgccgccctcaccctcctggtctccgcacgccgcctttaccgctgccacagagcgcgtccgcgccgggacgctcagcccggaagacgcacaccacctgttcgaccaattgctacagcagtccactccggtccccgagcaagccctgaacggcttccttgccgccctcacccgtgcccgtgcgccagacaccgacgtctgcagagacggcccctcccttgccctcacgctcttcaaccgcgtatggcgagaagaagccggccggcgggtggcgctgcccacagtccgcacctacaacattctgatgaactgctgctgccgcgtgcgtcgtccggacctagggcttgcctacttcgggcgcctcctaaggaccagcctcaaaacaaatgaggtcgtcgccaacaccgtcctcatgtgcctctgctgcgcgaaacggacagatgaagcagtaaacgtgctgcttcataggatgtctgtgctcggctgtgtgcctgatgagttctcatataacatagttctgaagagcttatgcaaagagggaaggagccagcaagcgctcaacctgctccatgtgatggcaaaaggagatggttgctcccccgacgtggtggcttataacacggtcatctatggcttctttaaggaaggtgaagtaggcaaggcatgcaatctattccatgaaatgatgcggcaaggggttgtgcctgatgtggtgacgtatagctcgattatcgatgcactgtgcaaggctggagcaatggacaaggcagagttgttccttcggcagatggttgataacagtgttcagccggatacggtgacatatactagcatgatccatggatattccactttgggccgctggaaagaggcgactaaaatgttaagagaaatgacaagcaggggccttataccaaatattgtcacttggaactcgttcatggcctccctttgcaagcatggaaaaagcaaagaagctgcagaaattttcttttccatggctgcaaggggccacaagcctgatatcgtctcctacactactcttcttcatgggtatgccaatgaaggaagctttgctgatatgatgaaactctttaattcaatggtaggcaacggtattgtagccaactgccaagttttcaacatattaattgatgcatatgctcaacgaggaatgatggacgaagctatgctcatatttactgaaatgccaggacaaggagtcaatccaaatgtagtcacctattcaattgtgatagcttcactttgcagaatgggtaggctggctgatgcaatgaataagttcagtgagatgattggtacgggagtacaaccgaacatagttgtttatcactccctagttcagggcttatgtacacatggtgatttggtgaaagcgaaggtgttgatttctgaaatgatgaataaaggtattactcgtccaaacattgcattcttcagttcaataatgggcagtctatgcaacgaaggaaggattatgaatgcacatgatatctttgacttggttacagacataggtgtgaaacctgatgttataacatttaatatgctgatggtcggatattgcttagttggcgagatggagaaagcattcaaggtacttgatgccatggtatcagttggcattgagcctgatgttgttacttatagctcacttattagtggctattgtaagactggaaggctcgacgatggtgttacactattcagagaaatgttgcataagagaattaaacctgacactgtttcctataacaccatactggatgggttatttaatgctgggagaactgctgctgcaaagaaaatgttccatgagatgatcgaaagtggagtaatggtgagcatttctacatataatataattcttggaggactttgtagaaataattgcatggatgaagcgatcgtcctattccggaaattacgtgcagtgaatgtgaagttcaatatcacaacactcaataccatcatcaatgcattatacaatgttcaaagaagagaagaagctcatgatttgtttgctgcattaccagccagccggctggtgcctaatgcttctacttacagagtaatgatagataatcttctaaaagaaggagcagtggaagaagctgacagtatgttctcatcaatggagaagagtggttgtgctcctagctctcattttttaaattatatcatcagaatgttattggaaaaaggggagatagtcaaggccggaaaatatatgtctaaagttgatgggaagattattttgcttgaagcttcaactacttcattgctgatgtccctcttctcaaggggaggcaaataccaggagcacatactcttgctccctgcaaaatatcattttttcagtggagtgaaccacagt

SEQ ID NO: 1561 - DNA, 2751 bp, Triticum aestivum; identical to SEQ ID NO: 1560

SEQ ID NO: 1562 - DNA, 2751 bp, Triticum aestivum; identical to SEQ ID NO: 1557

SEQ ID NO: 1563 - DNA, 1512 bp, Triticum aestivum
atgctcagaaaaatgacaacccggggtcttataccagatattgttacttgcagctcgttaatgacttccctttgcaagcatggaagaagcaaagaagcgttagacattttttgttccatgactgccaaaggcctcaaacctaatatcatcgcatactctattctgcttcatggatatgccaccgaaggatgctttgttgatatgattaatctctttaattcaatggaagacaatggtattgcagccaactgttatgttttcaacatattaattgatgcatatgctaaacatggaatgatggatgaagctatgctcatatttaccgaaatgcgggaaaaaggagtgagtcctgatgtagtcacctattccactgtaataaccgcattttgcagattgcgtaggctggccgatgctatggacaagttcaatgagatgactgatatgggtgttcagccggacacaactgtttatcactccttaattcagggcttttgtatgcatggtgatttggttaaagctaaggggctggtttctgaaatgacgaacaaaggtattcctcgtcctgacattgtgttcttcagttcaataataaacactctatgcaaagaaggaagggttatggatgcacaagatatctttgaaatggttataagcatagatgggagacctgatgtcattacattcagttcactgattgacggatatggcttagtcggccagatgggtaaagcactcggagtgcttgatgccatggtatcagctggcattgagcctgatgttgttacgtatagttcacttcttgatggctattgtagaaatggaaggatcaatgatgctttgattctatttagagaaatgccgcataagagaattaaacctaacactgttacatatggcatcatactggatgggttgtttcgtgctggaagaactgttgatgcaaggaaaatgttccatgagatgatcgaaaggggtataacagtgagcatttccatatacaatataatacttggaggtctttgtagaaataattgtgcagatgaagcgatcgcactgttccagaaattaggagcaatgaatgtaaagttcaacattataacactcaataccatgattaatgcaatgttcaaggttcggagaagagaagaagctaacgatttgtttgctgcaatatcagccggtgggttggtgcctaatgcttctacttacggcataatgataaaaaatattctaaaagaaggatcagtggaagaagttgacagtatgttttcatcaatggagaagagtggtataattcccaactcctgtcttataaatattatcatcagaatgttgttggaaaaaggtgagattgccaaggccagaaattatttatctaaagttgatgggaaggtcatctcacttgaagcttcaactacttctttgttgctgtctctcttttcaaggaaagggaaatatcgggaaagcattgaattgcttcctgcaaactatcaatttttcgatggatttggt

SEQ ID NO: 1564 - DNA, 2091 bp, Triticum aestivum
atgggctgcttctgcggtgcgcgtcgcccggacctagggcttgccttatttggccacttcctcaggacaggcctcaagacaaacaagattgtggccaccaccttcctcaagtgcctctgctgcgccaaacgtacagatgaggctgtcaacgtgctgcttcataggatgcccgagcttggctgtgtgcctgatgccttctcatactccatagttttgaagagcttatgtgaaaatagcatgagtcagcgggcactcgacctgctccagatggtggctaaagggggagatgcctgctctgtcaatgtggtggcatataacacggtcatccatggcttcttcaaggagggcgaaacaggcaaggcatgcaatctattccatgaaatgatccatcaaggggttgtgcccgatgtcgtgacatttaactcgattattcatgccttgtgcaaggccagagcaatggacaaggcagagattgtccttcggcagatggttgataatggtgctcaacccaatgaagtgacatataattgcatgatccatggatattcgaaatcagggcagttaagagagggtactaaaatgctcagaaaaatgacaacccggggtcttataccagatattgttacttgcagctcgttaatgacttccctttgcaagcatggaagaagcaaagaagcgttagacattttttgttccatgactgccaaaggcctcaaacctaatatcatcgcatactctattctgcttcatggatatgccaccgaaggatgctttgttgatatgattaatctctttaattcaatggaagacaatggtattgcagccaactgttatgttttcaacatattaattgatgcatatgctaaacatggaatgatgggtgaagctatgctcatatttaccgaaatgcgggaaaaaggagtgagtcctgatgtagtcacctattccactgtaatagccgcattttgcagattgcgtaggctggccgatgctatggacaagttcaatgagatgactgatatgggtgttcagccggacacaactgtttatcactccttaattcagggcttttgtatgcatggtgatttggttaaagctaaggggctggtttctgaaatgacgaacaaaggtattcctcgtcctgacattgcgttcttcagttcaataataaacactctatgcaaagaaggaagggttatggatgcacaagatatctttgaaatggttataagcatagatgggagacctgatgtcattacattcagttcactgattgacggatatggcttagtcggccagatgggtaaagcactcggagtgcttgatgccatggtatcagctggcattgagcctgatgttgttacgtatagttcacttcttgatggctattgtagaaatggaaggatcaatgatgctttgattctatttagagaaatgccgcgtaagagaattaaacctaacactgttacatatggcatcatactggatgggttgtttcgtgctggaagaactgttgatgcaaggaaaatgttccatgagatgatcgaaaggggtataacagtgagcatttccatatgcaatataatacttggaggtctttgtagaaataattgtgcagatgaagcgatcgcactgttccagaaattaggagcaatgaatgtaaagttcaacattataacactcaatgccatgattaatgcaatgttcaaggttcggagaagagaagaagctaacgatttgtttgctgcaatatcagccagtgggttggtgcctaatgcttctacttacggcataatgataaaaaatattctaaaagaaggatcagtggaagaagttgacagtatgttttcatcaatggagaagagtggtataattcccaactcctgtcttataaatattatcatcagaatgttgttggaaaaaggtgagattgccaaggccggaaattatttatctaaagttgatgggaaggtcatctcacttgaagcttcaactacttctttgttgctgtctctcttttcaaggaaagggaaatatcgggaaagcattgaattgcttcctgcaaactatcaatttttcgatggatttggt

SEQ ID NO: 1565 - DNA, 2091 bp, Triticum aestivum; identical to SEQ ID NO: 1564

SEQ ID NO: 1566 - DNA, 1512 bp, Triticum aestivum; identical to SEQ ID NO: 1563

SEQ ID NO: 1567 - DNA, 2091 bp, Triticum aestivum; identical to SEQ ID NO: 1564

SEQ ID NO: 1568 - DNA, 2091 bp, Triticum aestivum; identical to SEQ ID NO: 1564

SEQ ID NO: 1569 - DNA, 2439 bp, Triticum aestivum
atgtccggcgtctgcctccgccgccgcctctcctccacctccacctccaacacgccaccctcaccttcctggtcaccccaggccgcctttgccgcggccacggagcgcgcccgcgccggaacgctcagccctcaagacgcacaccacctgttcgacgaattgtttcggcaggccactccggttcccgagcgctcccttgaaggattccttgccgccctcggccgtgctgcatcctctgaagcctgcagagacggcccctcccttgccctcactctcttcaaccgtctctgccgagaagaagccggccggcgggtggcgccgcccacaatctacacctacggcatcctgatgaactgctgctgccgcgtgcgtcgtccagacctagggctcgccttcttcggccgcctcctaaggaccggcctcaaaacaaatgaggtcgtcgccagcaccctcctcaagtgcctctgctgtgcaaaacgggcagatgaagctgtgaacgtgctgcttcataggatgtccgtcctcggctgtgtgcctaattccttctcatacaacatagttctaaagagcttatgtgatgacagcaggagccagcgagcgctcggcctgctccagatgatggcaaaaggaggtgtctgctcccccaacgttctgtcatataacacagtcatccacggcttctttaaggaaggtgaaatagacaaggcctgcaatctattccatgaaatgacgaagcaagggtttgtgcctaatgtggtgacatataactcggttatcaatgcattgtgcaaggcccgagcaatggacaatgcagagtcgttccttcggcagatggttgataacggtgttccacctgataaggtgacatatactagcatcatccatggatattccactttgggccgatggaaagaggcaactaaaatgttcagagaaatgacaagcaggggtcttataccagatattgtcactcggaactcattcatggactcactctgcaagcatggaagaagcaaagaagctgcagaaattttcttttccatggctgcaaggggccacaagcctgatatcgtctcctacactattcttctccatgggtatggcaatgaaggaagcttttctgatatgatgagtctctttaattcaatggaaggcggcggtattgtggccgattgccaagttttcaacatattaattgatgcatatgctaaacgaggaatgatcgacgaagctatgctcatatttactgaaatgctaggacaaggagtcaatccgagtgtagtcacctactcaactctgatagctgcactttgcagaacaggtaggctagctgatgctatggataagtttagtcagatggttggtacgggagtacaaccggacacagttgtttatcactccctaattcagggtttctgtacacatggcgatttggtcaaagcgaaggaattgatttctgaaatgatgaataaaggtattatttgtccaaacattgcattcttcaattcaatagtagacagtctatgcaaagaaggaagggttatggatgcacaccatatctttgacttggttaaagacataggtgagaaacctgatgccatcatgtttaatacgctaattgacggatattgcttagttggtgagatgggcaaagcattcatggtacttgatgtcatgacatcagctggcattgagcctgatgccattacgtatagtacacttgtcagtggatattgtaaaagtggaaggatcgatgatgggttgattctgttcagagaagaaatgttgcataagaaagttaaaccaacaattgttacatataacatcatattggaggggttatttcgtgctgggagaacagttgctgcaaagaaaatgctccatgaaattatcggaagtgggacacctgtgagcatgcatacatacgacatatttcttagaggactttgtagaaataattgcgcggatgaagcgatcgtcctattccagaaatcacgtgcaatgaatgtgaagttcaatatcacaacactcaataccatgattaatgcattctacaagggtgacagaagagaagaagctaatgatttgtttgctgcattaccagccagcgggttggtgcctaatgcttccacttacggagtaatgatacaaaaccttctaaaagaaggagcagtggaggaagctgacaatatgttctcatcaatggagaagagtggttgtgctcctagctctcgtcttgtgaatgatgtcatcagaactttattggaaaagggggagatagtcaaggccggaaaatatatgtctaaagtttatgggaagagcctatcacttgatgcttcaactagttcgttgttgttgtctctcttttcagggaatgggaaatatcgggaacaaatacaattgctccctgcaaagtaccagtttttcggtggaatcagt

SEQ ID NO: 1570 - DNA, 2439 bp, Triticum aestivum; identical to SEQ ID NO: 1569

SEQ ID NO: 1571 - DNA, 2439 bp, Triticum aestivum; identical to SEQ ID NO: 1569

SEQ ID NO: 1572 - DNA, 2439 bp, Triticum aestivum; identical to SEQ ID NO: 1569

SEQ ID NO: 1573 - DNA, 2439 bp, Triticum aestivum; identical to SEQ ID NO: 1569

SEQ ID NO: 1574 - DNA, 2439 bp, Triticum aestivum; identical to SEQ ID NO: 1569

SEQ ID NO: 1575 - DNA, 1824 bp, Triticum aestivum
atgatggcaaaaggaggtgtctgctcccccaacgttctgtcatataacacggtcatccatggcttctttaaggaaggtgaaataggcaaggcctgcaatctattccatgaaatggcgaagcaagggtttgtgcctaatgtggtgacatataactcggttatcaatgcattgtgcaaggcccgagcaatggacaatgcagagtcgttccttcggcagatggttgataacggtgttccacccgataaggtgacatatactagcatcatccatggatattccactttgggccgatggaaagaggcaactaaaatgttcagagaaacgacaagcaggggtcatataccagatattgtcactcggaactcattcatggactcactctgcaagcatggaagaagcaaagaagctgcagaaattttcttttccatggctgcaaggggccacaagcctgatatcgtctcctgcactattcttctccatgggtatggcaatgaaggaagcttttctgatatgatgagtctctttaattcaatggaaggcggcggtattgtggccgattgccaagttttcaacatattaattgctgcatatgctaaacgaggaatgatcgacgaagctatgctcatatttactgaaatgctaggacaaggagtcaatccgagtgtagtcacctactcaactctgatagctgcactttgcagaacaggtaggctagctgatgctatggataagtttagtcagatggttgatacgggagtacaaccggacacagttgtttatcactccctaattcagggtttctgtacacatggcgatttggtcaaagcgaaggaattgatttctgaaatgatgaataaaggtatgatttgtccaaacattgcattcttcaattcaatagtagacagtctatgcaaagaaggaagggttatggatgcacaccatatctttgacttggttaaagacataggtgagaaacctgatgtcatcatgtttaatacgctaattgacggatattgcttagttggtgagatgggcaaagcattcatggtacttgatgtcatgacatcagctggcattgagcctgatgccattacgtatagtacacttgtgagtggatattgtaaaagtggaaggatcgatgatgggttgattctgttcagagaagaaatgttgcataagaaagttaaaccaacaattgttacatataacatcatattggaggggttatttcgtgctgggagaacagttgctgcaaagaaaatgctccatgaaattatcggaagtgggacacctgtgagcatgcatacatacgacatatttcttagaggactttgtagaaataattgcgcgaatgaagcgatcgtcctattccagaaatcacgtgcaatgaatgtgaagttcaatatcacaacactcaataccatgattaatgcattctacaagggtgacagaagagaagaagctaatgatctgtttgctgcattaccagccagcgggttggtgcctaatgcttccacttacggagtaatgatacaaatccttctaaaggaaggagcagtggaggaagctgacaatatgttctcatcaatggagaagagtggttgtgctcctagctctcgtcttgtgaatgatgtcatcagaactttattggaaaagggggagatagtcaaggccggaaaatatatgtctaaagttgatgggaagagcatatcacttgatgcttcaactagttcgttgttgttgtctctcttttcagggaatgggaaatatcgggaacaaatacaattgctccctgcaaagtaccagtttttcggtggaatcagt

SEQ ID NO: 1576 - DNA, 2640 bp, Triticum aestivum
atgctccgccgcatccgcatctccactcctgtcatcggaggaaaaaaagctcccgtacgaactcccgacgccgatgctccgcggcatccgcacccgcctccgtcgccgcccctccccctcctgcacctagccggcgtccgttctccgcctccctctccgccactcgtccgcctccaccagtaccgcaccaccagcacgccgatgtcccgcatccacctccacctccaccaacaccgccgcctcttctcctccacctcgccgccctcgcgctcctggtctccccacgaagcctttgccgcggccacagagcgcgtccgcgccgggaatttcagctgggaagacgcacacaacctgttcgacgaattgctgcggcaggccaccccggtccccgggcgctccctcaacggcttccttgccgccctcgcccgtgcgcccgcctccgaagcctgcagagatggtcccgccctcgccctcgctctcttcaaccacgtctgccgggacgaatccggcgcgcgggtggcaccgcccacaatcttcacgtacggcattctcatgaactgctgctgtcgtgcgcatcgcccggacctagggctagccttcttcggtcgcctcctcaggacgggcctgaaggctgacctgatcgtcgccaacaccctccttaagtgtctctgccgcgcgaaacggacggatgaggctgtgaacgtgctgcttcataggatgtctgagctcggctgtgtgcctgatgccttctcatactccattgttctcaagagcttatgcgacaatggcatgagtcagcaggcgctcaacctgctccatatgatggcgaaagtaggaggtggctgctcccccgacgtggtggcgtatagcacagtcatccatggcttctttaaggaaggtgaaacaggcaaggcatgcaatctgttccatgaaatgatgcagcaaggtgttgagcccaatgtgtggacatatagttcaatcattgatgcattgtgcaaggccagagcaatggacaaggcagagctagtgcttcagcagatggttaacaaaggtgttcaacccgataatgtgacatataattgcatgatccatggatattccacatctgggcggtggaaagaggctgttaaattgtttagagaaatgaaaagccggggccttataccagataattttacttgcaactccttaatgacttacctttgtaagcatggaagaagcaaagaaggtgcagaattttttgatgccatgactgccaaagggcacagagatgtcatctcctactatattttgcttcatgggtatgccaatgaaggatgctttgctgatatgattgatctctttaattcaatggaaagaaacggtattgctgccaactgccgtgttttcaacatattaattaatggacatgctaaacgtggaatgacggatgaagctatgctgatatttacagaaatgtgggaaaaaggagtgagtcccaatgtagtcacatattccactgtaatagctgcactttccaggatgggtaggttgactgattctatggaaaaatttaatcagatgattgccatgggaattcagccaaacacagctgtttatcactccctaattcagggttgttttatgcatggtggcttggttaaagctaaggagctgatgtttgaaatgatgaacaaaggtattcctcgtcctaacattgttttcttcagttcagtaataaacagtctgtgcaaagaaggaagggttatggatgcacatgctgtctttgacttggctataggcatcggtgagaggcctaatgtcattacatttaattcactgattgacggatattgcttagttgggaagatggataaagcattcaaaatacttcatgtcatggaatcagttggtgttgagtctgatgttgttacttatagcgcacttcttgatggctattttaaaaacagaaggattgatgatgctttgactttgtttagagaaatgccgcgcaagagaattaaacctaacactgttacatatggcatcatgttgggtgggttgtttcatgctgggagaactgttgctgcaatgaaaatgttccatgagatgattgaaagtggagcaacagtgcgcatttccacatacaatataatacttggaggtctttgtcaaactaattgtgtagacgaagcgattgcactgttccagaaattgcgagcaatgaatgtgaagttcaatattgaaatattcaataccatgattgatgcaatgtacaaggttcaaagaaaagaagaagctaaggaattgtttgctgcaatatcaggcaatgggttggtgcccaatgaatatacttatgcagtaatgataagaaatcttctaaaaggcggagcagtggaagatgctgacaatatgttttcatcaatggacaacagtggcatcgttcctagttcccgtcttataaatgatatcatcagaatgttgttggaaaaaggtgagatagccaaggctggcaattatttgtctaaagttgatgggaagagtatctcacttgaagcttcaactacctcattgatgttgtctctcttttcaaggaaagggaaacatctggaggatattaagttgctccctgcaaagtatcaattttttgatggatttggt

SEQ ID NO: 1577 - DNA, 2640 bp, Triticum aestivum
atgctccgccgcatccgcatctccactcctgtcatcggaggaaaaaaagctcccgtacgaactcccgacgccgatgctccgcggcatccgcacccgcctccgtcgccgcccctccccctcctgcacctagccggcgtccgttctccgcctccctctccgccactcgtccgcctccaccagtaccgcaccaccagcacgccgatgtcccgcatccacctccacctccaccaacaccgccgcctcttctcctccacctcgccgccctcgcgctcctggtctccccacgaagcctttgccgcggccacagagcgcgtccgcgccgggaatttcagctgggaagacgcacacaacctgttcgacgaattgctgcggcaggccaccccggtccccgggcgctccctcaacggcttccttgccgccctcgcccgtgcgcccgcctccgaagcctgcagagatggtcccgccctcgccctcgctctcttcaaccacgtctgccgggacgaatccggcgcgcgggtggcaccgcccacaatcttcacgtacggcattctcatgaactgctgctgtcgtgcgcatcgcccggacctagggctagccttcttcggtcgcctcctcaggacgggcctgaaggctgacctgatcgtcgccaacaccctccttaagtgtctctgccgcgcgaaacggacggatgaggctgtgaacgtgctgcttcataggatgtctgagctcggctgtgtgcctgatgccttctcatactccattgttctcaagagcttatgcgacaatggcatgagtcagcaggcgctcaacctgctccatatgatggcgaaagtaggaggtggctgctcccccgacgtggtggcgtatagcacagtcatccatggcttctttaaggaaggtgaaacaggcaaggcatgcaatctgttccatgaaatgatgcagcaaggtgttgagcccaatgtgtggacatatagttcaatcattgatgcattgtgcaaggccagagcaatggacaaggcagagctagtgcttcagcagatggttaacaaaggtgttcaacccgataatgtgacatataattgcatgatccatggatattccacatctgggcggtggaaagaggctgttaaattgtttagagaaatgaaaagccggggccttataccagataattttacttgcaactccttaatgacttacctttgtaagcatggaagaagcaaagaaggtgcagaattttttgatgccatgactgccaaagggcacagagatgtcatctcctactatattttgcttcatgggtatgccaatgaagaatgctttgctgatatgattgatctctttaattcaatggaaagaaacggtattgctgccaactgccgtgttttcaacatattaattaatggatatgctaaacgtggaatgacggatgaagctatgctgatatttacagaaatgtgggaaaaaggagtgagtcccaatgtagtcacatattccactgtaatagctgcactttccaggatgggtaggttgactgattctatggaaaaatttaatcagatgattgccatgggaattcagccaaacacagctgtttatcactccctaattcagggttgttttatgcatggtggcttggttaaagctaaggagctgatgtttgaaatgatgaacaaaggtattcctcgtcctaacattgttttcttcagttcagtaataaacagtctgtgcaaagaaggaagggttatggatgcacatgctgtctttgacttggctataggcatcggtgagaggcctaatgtcattacatttaattcactgattgacggatattgcttagttgggaagatggataaagcattcaaaatacttcatgtcatggaatcagttggtgttgagtctgatgttgttacttatagcgcacttcttgatggctattttaaaaacagaaggattgatgatgctttgactttgtttagagaaatgccgcgcaagagaattaaacctaacactgttacatatggcatcatgttgggtgggttgtttcatgctgggagaactgttgctgcaatgaaaatgttccatgagatgattgaaagtggagcaacagtgcgcatttccacatacaatataatacttggaggtctttgtcaaactaattgtgtagacgaagcgattgcactgttccagaaattgcgagcaatgaatgtgaagttcaatattgaaatattcaataccatgattgatgcaatgtacaaggttcaaagaaaagaagaagctaaggaattgtttgctgcaatatcaggcaatgggttggtgcccaatgaatatacttatgcagtaatgataagaaatcttctaaaaggcggagcagtggaagatgctgacaatatgttttcatcaatggacaacagtggcatcgttcctagttcccgtcttataaatgatatcatcagaatgttgttggaaaaaggtgagatagccaaggctggcaattatttgtctaaagttgatgggaagagtatctcacttgaagcttcaactacctcattgatgttgtctctcttttcaaggaaagggaaacatctggaggatattaagttgctccctgcaaagtatcaattttttgatggatttggt

SEQ ID NO: 1578 - DNA, 2640 bp, Triticum aestivum; identical to SEQ ID NO: 1577

SEQ ID NO: 1579 - DNA, 2640 bp, Triticum aestivum; identical to SEQ ID NO: 1577

SEQ ID NO: 1580 - DNA, 2640 bp, Triticum aestivum; identical to SEQ ID NO: 1577

SEQ ID NO: 1581 - DNA, 2640 bp, Triticum aestivum; identical to SEQ ID NO: 1576

SEQ ID NO: 1582 - DNA, 2631 bp, Triticum aestivum
atgctccgccgcatccgcatctccactcctgtagctcccgtacggactcccgacgccgatgctccgcggcatccacacccgcctccgttgccgcccctccccctcctgcacctagccggagtccgttctccgcctccctctccgccactcgtccgcctccaccagtaccgcaccaccagcacgccgatgtcccgcatccacctccacctccacctccaccaacaccgccgcctcttctcctccacctcgccgccctcgcgctcctggtctccccacgaagcctttgccgcggccacagagcgcgtccgcgccgggaatttcagctgggaagacgcacacaacctgttcgacgaattgctgcggcaggccaccccggtccccgggcgctccctcaacggcttccttgccgccctcgcccgtgcgcccgcctccgaagcctgcagagatggccctgccctcgccctcgctctcttcaaccacgtctgccgggacgaatccggcgcgcgggtggcaccgcccacaatcttcacgtacggcattctcatgaactgctgctgtcgtgcgcatcgcccggacctagggctagccttcttcggtcgtctcctcaggacgggcctgaaggctgacctgatcgtcgccaacaccctccttaagtgtctctgccgcgcgaaacggacggatgaggctgtgaacgtgctgcttcataggatgtccgagctcggctgtgtgcctaatgccttctcatactccattgttctcaagagcttatgcgacaatggcatgagtcagcaggcactcgacctgctccatatgatggcgaaagaaggaggtgactgctcccccgacgtggtggcgtatagcacagtcatccatggcttctttaaggaaggtgaaacaggcaaggcatgcaatctgttccatgaaatgatgcagcaaggtgttgagcccaatgtgtggacatatagttcaatcattgatgcattgtgcaaggccagagcaatggacaaggcagagctagtgcttcagcagatggttaacaaaggtgttcaacccgataatgtgacatataattgcatgatccatggatattccacatctgggcggtggaaagaggctgttaaattgtttagagaaatgaaaagccggggccttataccagataattttacttgcaactccttaatgacttacctttgtaagcatggaagaagcaaagaaggtgcagaattttttgatgctatgactgccaaagggcacagagatgtcatctcctactgtattttgcttcatgggtatgccaatgaaggatgctttgctgatatgattgatctctttaattcaatggaaagaaacggtattgctgccaactgccgtgttttcaacatattaattaatggatatgctaaacgtggaatgacggaagaagctatgctgatatttacagaaatgtgggaaaaaggagtgagtcccaatgtagtcacatattccactgtaatagctgcactttccaggatgggtaggttgactgattctatggacaaatttaatcagatgattgccatgggaattcagccaaacacagctgtttatcactccctaattcagggttgttttatgcatggtggcttggttaaagctaaggagctgatgtttgaaatgatgaacaaaggtattcctcgtcctaacattgttttcttcagttcagtaataaacagtctgtgcaaagaaggaagggttatggatgcacatgctgtctttgacttggctataggcataggtgagaggcctaatgtcattacatttaattcactgattgacggatattgcttagttgggaagatggataaagcattcaaaatacttcttgtcatggaatcagttggtgttgagcctgatgttgttacttatagtgcacttcttgatggctattttaaaaacagaagcattgatgatgctttgactttttttagagaaatgccgcgcaagagaattaaacctaacactgttacatatggcatcatgttgggtgggttgtttcgtgctgggagaactgttgctgcaatgaaaatgttccatgagatgattgaaagtggagcaacagtgcgcatttccacatacaatataatacttggaggtctttgtcaaactaattgtgtagacgaagcgattgcactgttccagaaattgcgagcaatgaatgtgaagttcaatattgaaatattcaataccatgattgatgcaatgtacaaggttcaaagaaaagaagaagctaaggaattgtttgctgcaatatcaggcaatgggttggtgcccaatgaatatacttatgcagtaatgataagaaatcttctaaaaggcggagcagtggaagatgctgacaatatgttttcatcaatggacaacagtggcatcgttcctagttcccgtcttataaatgatatcatcagaatgttgttggaaaaaggtgagatagccaaggctggcaattatttgtctaaagttgatgggaagagtatctcacttgaagcttcaactacctcattgatgttgtctctcttttcaaggaaagggaaacatctggaggatattaagttgctccctgcaaagtatcaattttttgatggatttggt

SEQ ID NO: 1583 - DNA, 1101 bp, Triticum aestivum
atggctgcaaagggcctgaaacctaatatcgtctcctactctactatgcttaatgggtatgtcaaagaaggatccttcgaggatatgactgatctcttcaattcgatggtacggaatggtattgtacctaaccaccatattttcaacatacagatcaatgcatatgctaaacgtggactgatggatgaggctatgcacatgttcgaagtaatgaggcaacaaggagtaaacccaaacgtagttgactatctagtagtaatgaattcactctgcaaaatgggtaggatggatgctgctctggacaaatttaatcagatggtcaatcaaggagtttcacctaacaaagctgtttaccaatgcctggttctgggttcttgctctcatggtcattttgtgaaagccaaggaattgatttctgaagcggttaatagaggtctgtgttctaacagtgtgttcttctatcctgtaataaacgacctttgcaaggaaggaaaggtagaaggaaaggtgaaggaggcacaggatatgtttgacttcattgtaggtattggtcatcggcctgatgtgattatgtacacttcactgatggatggatattgccttgttggcaaggtggaggaagcactgagagtacttgatgctatgaagtctgctggcctccaacctgatgcttttacatatggtatacttattaatggctactgtaaaattggaaggatcgacgagggattgagtcttgtcagggaaatttcactcagtggggttaagcccacgactattatgtacaacattatacttgatgggctgttttgctctgggagaacagttcctgcaaaggaaaaattccataagatgaatgaaagtgccataccagtgggcgttggaacatacaacatagttcttagtggactttgtaaaaataattgcactgatgaagcaatagagctgttcaagaaattacgtgctgtgaacgtgaagattaatgtcataacactcactaccatgatttctgcaatgttttcacaaaagaatggatccacgctcgccttacatcttctctcttccttttgccatctcattttgtttgctcaactaaacata

SEQ ID NO: 1584 - DNA, 1101 bp, Triticum aestivum; identical to SEQ ID NO: 1583

SEQ ID NO: 1585 - DNA, 1101 bp, Triticum aestivum
atggctgcaaagggcctgaaacctaatatcgtctcctactctactatgcttaatgggtatgtcaaagaaggatccttcgaggatatgactgatctcttcaattcgatggtacggaatggtattgtacctaaccaccatattttcaacatacagatcaatgcatatgctgaacgtggactgatggatgaggctatgcacatgttcgaagtaatgaggcaacaaggagtaaacccaaacgtagttgactatctagtagtaatgaattcactctgcaaaatgggtaggatggatgctgctctggacaaatttaatcagatggtcaatcaaggagtttcacctaacaaagctgtttaccaatgcctggttctgggttcttgctctcatggtcattttgtgaaagccaaggaattgatttctgaagcggttaatagaggtctgtgttctaacagtgtgttcttctatcctgtaataaacgacctttgcaaagaaggaaaggtagaaggaaaggtgaaggaggcacaggatatgtttgacttcattgtaggtattggtcatcggcctgatgtgattatgtacacttcactgatggatggatattgccttgttggcaaggtggaggaagcactgagagtacttgatgctatgaagtctgctggcctccaacctgatgcttttacatatggtatacttattaatggctactgtaaaattggaaggatcgacgagggattgagtcttgtcagggaaatttcactcagtggggttaagcccacgactattatgtacaacattatacttgatgggctgttttgctctgggagaacagttcctgcaaaggaaaaattccataagatgaatgaaagtgccataccagtgggcgttggaacatacaacatagttcttagtggactttgtaaaaataattgcactgatgaagcaatagagctgttcaagaaattacgtgctgtgaacgtgaagattaatgtcataacactcactaccatgatttctgcaatgttttcacaaaagaatggatccacgctcgccttacatcttctctcttccttttgccatctcattttgtttgctcaactaaacata

SEQ ID NO: 1586 - DNA, 651 bp, Triticum aestivum
atgcgctggtcgcccacactctgtacctattccatcctcatgtactgctgctgccgtgcaggccgcccggacttggtggttgccttcttcggccgcatcctcaggttggggctgcgcttggacgtcatctccttaaacaatctcctcaaggggctttgccaggctaagcgctcaaatgaggcattggatctgctgctccaccggatgcccgaactacactgtgcgcctgatgtcttctcgtacaacatagtaatcaacggctgcttgaaagaaggtgaagtagacaaagcgtgcaatctcttccatgagatgccccaactgggagttcaacctgatgtggtgacctacacctcaatcatggacgcactaagcaagtccggagcaatggacaaggcagaagtgctccttcggcaaatggttgatcaaggaattgaacccaatatcaggacatatagctgtctgatccatggatattctacttttggtcagtggaaggaggcacttagggtattcaaagaaatggcaactcttggtgttgtaccagacgttgtcacgttgagctcattaatcgattccctttgcaagcacagaaggacaaaggaagctagagaaatttttgactctatatatggctgcaaagggcctgaaacc

SEQ ID NO: 1587 - DNA, 2319 bp, Triticum aestivum
atgtcaaccgcccgcctgtcctccaccttcacctcctccttcaaggctccttcacggaaaccacgagccccccgcctcgccgccttggctgccgccacggagcgcgtccgcgccggaacgctaagtcggcaggacgcgcaccacctgttcgacgaattgctgagccaagccgcgacagtcccagtacgcacgctcaacaattttcttgccgccctcgcccgtgctccgccctcagctgcctgtggcgatggccctgcccttgccgtcaccctcttcaaccgcatgtcccgaggcgctggtgcacgggtggtgtcgcccacgctctgtacctattccatcctcatggactgctgctgccgcgcaggccgcccggacttggtggttgccttcttcggccgcctcctcaggttggggctgcgcttggaggtcatctccttcagcaatctccttaaggggctctgccaggccaagcgtacaaatgaggcggtggacttgctgctccaccggacacctgaactggactgtgtgcctaatgtcttctcgtacagcatcgtaatcaacggctgttttaaagaaggtgaagtagacaaagcgtgcaatctcttccatgggatgatccaactgggagttcaacctaatgtggtcatctacacctcaattatcgatgcactaagcaagtgcggagccatggacaaggcagaagtggtctttcggcaaatggttgataaaggtattggacccgatgtcatgacatgcactagtctgatccatggatattccatttcgggtaggtggaaggcggcagtaagggtattcaaagagatgataagtcttggtgttgtaccagataccgtcatgtggaactcatttgtggattcactttgcaagcatagaaggacaaaggaagctagagttatttttgactccatggctgcaaagggccagaaacctgatactgtctcctactctattatgcttaacgggtatgtgaaagaaggatgctttgatgatatgaccggtctcttcaattcgatgctacagaacggtgttgtacctaaccaccatattttcaacatactgatcaatgcatatgctaaacgtggactgatggatgaggctatgcacatgttcgaagtaatgaggcaacaaggagtaaacccagatgtagttgactatctagtagtaatggattcactttgcaaaatgggtaggatggatgctgctctggacaaatttaatcagatggtcaatcaaggagtttcacctaacaaagctgtttaccaatgcctggttctgggtttttgctctcatggcgattttgtgaaagccaaggaattgatctctgaaacaattaatagaggtctgtgttctaacaatgtgttcttctatcctgtaataaacgacctgtgcaaagaaggaaaggtgaaggaggcacaggatatgtttgacttcattgtaggtattggtcagcggcccgatgtgattatgtacaattcactgatggatggatattgccttgttggcaaggtggaggaagcactgagagtacttgatgctatgaagtctgctggcctccaacctgatgctattacgtatgctatacttcttaatggctactgtaaaattggcaggatcgccgatggattgagtcttttcagggaaatgtcactcagcggggttaagcccacgactattatgtacagcattatacttgatgggctgtttcgctccgggagaacagtttctgcaaaggaaaaattcaatacgatggttgaaagtggcttaccagtggacgttcgcacatacaacatagttcttcatggactttgtagaaacaattgcactggtgaagcaatagagttgttcaaaaaattatgtgcaacgaacttgaagattaatgtcataacattcaataccatgatttctgcaatgtttaaaactaggagaattggagaagccaaggatttgtttgctactatatcagccatcgggttggtgccttctgttgtgacttacagtgtaatgacgacgaatttcataaaagaagggttgctggcggaggctgatgatatgtttttagcaatggagaaggctggctgtgctcctgactccagactgctaaatcacgtggtcagcgtgttgctggagaatggtgcagttgtaaaggctgcaacttatctcgctaaacttgatgcaaaacagctttcacttgaagcttcgacagtttcgttaattgtatctctcttctcaaggaaagggaaattaagggagcatgtaaagttgcttccggtaaagtaccagcctcctgagatgttgggc

SEQ ID NO: 1588 - DNA, 2319 bp, Triticum aestivum
atgtcaaccgcccgcctgtcctccaccttcacctcctccttcaaggctccttcacggaaaccacgagccccccgcctcgccgccttggctgccgccacggagcgcgtccgcgccggaacgctaagtcggcaggacgcgcaccacctgttcgacgaattgctgagccaagccgcgacagtcccagtacgcacgctcaacaattttcttgccgccctcgcccgtgctccgccctcagctgcctgtggcgatggccctgcccttgccgtcaccctcttcaaccgcatgtcccgaggcgctggtgcacgggtggtgtcgcccacgctctgtacctattccatcctcatggactgctgctgccgcgcaggccgcccggacttggtggttgccttcttcggccgcctcctcaggttggggctgcgcttggaggtcatctccttcagcaatctccttaaggggctctgccaggccaagcgtacaaatgaggcggtggacttgctgctccaccggacacctgaactggactgtgtgcctaatgtcttctcgtacagcatcgtaatcaacggctgttttaaagaaggtgaagtagacaaagcgtgcaatctcttccatgggatgatccaactgggagttcaacctaatgtggtcatctacacctcaattatcgatgcactaagcaagtgcggagccatggacaaggcagaagtggtctttcggcaaatggttgataaaggtattggacccgatgtcatgacatgcactagtctgatccatggatattccatttcgggtaggtggaaggcggcagtaagggtattcaaagagatgataagtcttggtgttgtaccagataccgtcatgtggaactcatttgtggattcactttgcaagcatagaaggacaaaggaagctagagttatttttgactccatggctgcaaagggccagaaacctgatactgtctcctactctattatgcttaacgggtatgtgaaagaaggatgctttgatgatatgaccggtctcttcaattcgatgctacagaacggtgttgtacctaaccaccatattttcaacatactgatcaatgcatatgctaaacgtggactgatggatgaggctatgcacatgttcgaagtaatgaggcaacaaggagtaaacccagatgtagttgactatctagtagtaatggattcactttgcaaaatgggtaggatggatgctgctctggacaaatttaatcagatggtcaatcaaggagtttcacctaacaaagctgtttaccaatgcctggttctgggtttttgctctcatggcgattttgtgaaagccaaggaattgatctctgaaacaattaatagaggtctgtgttctaacaatgtgttcttctatcctgtaataaacgacctgtgcaaagaaggaaaggtgaaggaggcacaggatatgtttgacttcattgtaggtattggtcagcggcccgatgtgattatgtacaattcactgatggatggatattgccttgttggcaaggtggaggaagcactgagagtacttgatgctatgaagtctgctggcctccaacctgatgctattacgtatgctatacttcttaatggctactgtaaaattggcaggatcgccgatggattgagtcttttcagggaaatgtcactcagcggggttaagcccacgactattatgtacagcattatacttgatgggctgtttcgctccgggagaacagtttctgcaaaggaaaaattcaatacgatggttgaaagtggcttaccagtggacgttcgcacatacaacatagttcttcatggactttgtagaaacaattgcactggtgaagcaatagagttgttcaaaaaattatgtgcaacgaacgtgaagattaatgtcataacattcaataccatgatttctgcaatgtttaaaactaggagaattggagaagccaaggatttgtttgctactatatcagccatcgggttggtgccttctgttgtgacttacagtgtaatgacgacgaatttcataaaagaagggttgctggcggaggctgatgatatgtttttagcaatggagaaggctggctgtgctcccaactccaggctgctaaatcacgtggtcagagtgttgctggagaatggtgcagttgtaaaggctgcaacttatctcgctaaacttgatgcaaaacagctttcacttgaagcttcgacagtttcgttaattgtatctctcttctcaaggaaagggaaattaagggagcatgtaaagttgcttccggtaaagtaccagcctcctgagatgttggac

SEQ ID NO: 1589 - DNA, 1617 bp, Triticum aestivum
atgtcaaccgcccgcctgtcctccaccttcacctcctccttcaaggctccttcacggaaaccacgagccccccgcctcgccgccttggctgccgccacggagcgcgtccgcgccggaacgctaagtcggcaggacgcgcaccacctgttcgacgaattgctgagccaagccgcgacagtcccagtacgcacgctcaacaattttcttgccgccctcgcccgtgctccgccctcagctgcctgtggcgatggccctgcccttgccgtcaccctcttcaaccgcatgtcccgaggcgctggtgcacgggtggtgtcgcccacgctctgtacctattccatcctcatggactgctgctgccgcgcaggccgcccggacttggtggttgccttcttcggccgcctcctcaggttggggctgcgcttggaggtcatctccttcagcaatctccttaaggggctctgccaggccaagcgtacaaatgaggcggtggacttgctgctccaccggacacctgaactggactgtgtgcctaatgtcttctcgtacagcatcgtaatcaacggctgttttaaagaaggtgaagtagacaaagcgtgcaatctcttccatgggatgatccaactgggagttcaacctaatgtggtcatctacacctcaattatcgatgcactaagcaagtgcggagccatggacaaggcagaagtggtctttcggcaaatggttgataaaggtattggacccgatgtcatgacatgcactagtctgatccatggatattccatttcgggtaggtggaaggcggcagtaagggtattcaaagagatgataagtcttggtgttgtaccagataccgtcatgtggaactcatttgtggattcactttgcaagcatagaaggacaaaggaagctagagttatttttgactccatggctgcaaagggccagaaacctgatactgtctcctactctattatgcttaacgggtatgtgaaagaaggatgctttgatgatatgaccggtctcttcaattcgatgctacagaacggtgttgtacctaaccaccatattttcaacatactgatcaatgcatatgctaaacgtggactgatggatgaggctatgcacatgttcgaagtaatgaggcaacaaggagtaaacccagatgtagttgactatctagtagtaatggattcactttgcaaaatgggtaggatggatgctgctctggacaaatttaatcagatggtcaatcaaggagtttcacctaacaaagctgtttaccaatgcctggttctgggttcttgctctcatggtgattttgtgaaagccaaggaattgatttctgaagcacttaatagaggtctctgttctaacagtgtgttcttctatcctgtaataaacgacctgtgcaaagaaggaaaggtgaaggaggcacaggatatgtttgacttcattgtaggtattggtcagcggcccgatgtgattatgtacaattcactgatggatggatattgccttgttggcaaggtggaggaagcactgagagtacttgatgctatgaagtctgctggcctccaacctgatgctattatgtatggtatacttcttaatgatcac

SEQ ID NO: 1590 - DNA, 2319 bp, Triticum aestivum; identical to SEQ ID NO: 1587

SEQ ID NO: 1591 - DNA, 2319 bp, Triticum aestivum; identical to SEQ ID NO: 1588

SEQ ID NO: 1592 - DNA, 2319 bp, Triticum aestivum; identical to SEQ ID NO: 1588

SEQ ID NO: 1593 - DNA, 2361 bp, Triticum aestivum
atgcctcgcttctcctcaaccacgccaatggcgccaccccgcctcctcctccgactcggcgcccgccactcctcctccacctctcatccctcacgcatctgggatccccacgccgccttcgccgccgccgcagaccgcgcgcgctctggcaacctcaccccggaggacgcacaccacctgttcgacgaattgctgcggcagggcaatcctgtccaggagcgtcccttgaataactttctggctgccctcgcccgcgcgcccgcgtctgcatcctgcagtgattgccccgccctggccgttgccctcttcggccgtttgtcccgaggcgccggacgacgggtggtgcagccaaatgtgttcacctatggcgtcctcatggactgctgctgccgcgcgtgccgcacggatctggcgctcgccttcttcggccgtctcctcaagacgggcctggaggcagaccaagtcgtcttcagcaccctcctgaagggcctttgccacgcaaagcgggcagatgaggctctggacgtgctgcttgacaggatgcctgagctgggctgcacccctgacgtggtggcgtataccacggtcatccatggcttctttagggaaggccaagtaggcaaggcgtgcgatctgttccatgaaatggcgcagcagggcgttacacctgatgtggtgacatatagctcggttattgatgcgctgtgcaaggccaaagcaatggacaaggcagagtatttccttggtcagatggttgatagtggtgtcgtacctaataatgtgacatataatagcctcatccatggatattcctcttcaggccattcaaaggaggcggtcagggtgctgaaaaaaatgacaagtcagggtattataccagatgtttttacttgcaactcgctcatggcctccctttgcaacaacagaaaaagcaaagaagctgcagaaatttttcactccatggccatgaagggcctgaaacctgatatcgtctcgtacagtactctgcttcacgggtatgccaccgaaggatgcttagttgatatgactaatctctttaattcaatgactagagatggtattctccctaactgtcatgctttgaacatactgattaatgcatatgcgaaatctggcatgatggatgaggccatgcttatatttaaaggaatgcggaaacaaggagtgagtccagatgcagtcacatatgcaaccgtaatacatgcattctgcagaaatggtaggttggacgatgctgtgataaagtttaatcagatgattgatacaggagtacgaccggacacggctgtttatggttctctaatccagggtttttgtacacatggcgatttggtgaaatcaaaggaattggttactgaaatgatgaacaaaggtatacctcgtcctgatattaagttcttccattcaatcatgcaaaacctatgcacagaaggaagggtaatagaagcacgggatatccttggcttgatagcacacattggtatgaggcctaatgttgtcacatttagtgtactgatcggtggatactgcctagtccgcaagatggcagatgcatcgaaagtatttgatgatatggtgtcatatggtttagaaccgtctaatattacatatggtatacttattaatggctattgcaaaaacaaaaggattgacgatgggctgattctattcaaaacaatgttgcacaagggacttaaacctacaacttttaattataacgtcatactggatggattatttctggctggacgaacagttgctgcaaaagagaagtttaatgagatggttgaatctggagtaagtgtgtgcattggcacatgctctatagttcttggtggactttgtagaaatggctgcagtagcgaagcgatcaccctgttccgaaaattaagcgcaatgaatgtgaaatttgatattacaattgtcaataccattattggtgccttctacagggtcgagagaaaccaagaggctaaggatttgtttgctgctattccagccaatggcttggttcctaattctattacctacaccataatgatgacaaatcttataaaagaaggttcagtggaagaagctgacaatctttttttatcgatggagaatagcggctgtagtgccaactcttatctgttaaatcatgtcatcagaaggttactgcaaaaaggagagatagtcaaggctggaaattatatgtctaaagttgatgcaaagagcttttcacttgaagctaaaactgtttcactgctgatctctctgttttcaaggaaagggaaatatagagaacacatcaaattgctgcctacaaagtatcagtttctggaagaagccacagttgaa

SEQ ID NO: 1594 - DNA, 2361 bp, Triticum aestivum
atgcctcgcttctcctcaaccacgccaatggcgccaccccgcctcctcctccgactcggcgcccgccactcctcctccacctctcatccctcacgcatctgggatccccacgccgccttcgccgccgccgcagaccgcgcgcgctctggcaacctcaccccggaggacgcacaccacctgttcgacgaattgctgcggcagggcaatcctgtccaggagcgtcccttgaataactttctggctgccctcgcccgcgcgcccgcgtctgcatcctgcagtgattgccccgccctggccgttgccctcttcggccgtttgtcccgaggcgccggacgacgggtggtgcagccaaatgtgttcacctatggcgtcctcatggactgctgctgccgcgcgtgccgcacggatctggcgctcgccttcttcggccgtctcctcaagacgggcctggaggcagaccaagtcgtcttcagcaccctcctgaagggcctttgccacgcaaagcgggcagatgaggctctggacgtgctgcttgacaggatgcctgagctgggctgcacccctgacgtggtggcgtataccacggtcatccatggcttctttagggaaggccaagtaggcaaggcgtgcgatctgttccatgaaatggcgcagcagggcgttacacctgatgtggtgacatatagctcggttattgatgcgctgtgcaaggccaaagcaatggacaaggcagagtatttccttggtcagatggttgatagtggtgtcgtacctaataatgtgacatataatagcctcatccatggatattcctcttcaggccattcaaaggaggcggtcagggtgctgaaaaaaatgacaagtcagggtattataccagatgtttttacttgcaactcgctcatggcctccctttgcaacaacagaaaaagcaaagaagctgcagaaatttttcactccatggccatgaagggcctgaaacctgatatcgtctcgtacagtactctgcttcacgggtatgccaccgaaggatgcttagttgatatgactaatctctttaattcaatgactagagatggtattctccctaactgtcatgctttgaacatactgattaatgcatatgcgaaatctggcatgatggatgaggccatgcttatatttaaaggaatgcggaaacaaggagtgagtccagatgcagtcacatatgcaaccgtaatacatgcattctgcagaaatggtaggttggacgatgctgtgataaagtttaatcagatgattgatacaggagtacgaccggacacggctgtttatggttctctaatccagggtttttgtacacatggcgatttggtgaaatcaaaggaattggttactgaaatgatgaacaaaggtatacctcgtcctgatattaagttcttccattcaatcatgcaaaacctatgcacagaaggaagggtaatagaagcacgggatatccttggcttgatagcacacattggtatgaggcctaatgttgtcacatttagtgtactgatcggtggatactgcctagtccgcaagatggcagatgcatcgaaagtatttgatgatatggtgtcatatggtttagaaccgtctaatattacatatggtatacttattaatggctattgcaaaaacaaaaggattgacgatgggctgattctattcaaaacaatgttgcacaagggacttaaacctacaacttttaattataacgtcatactggatggattatttctggctggacgaacagttgctgcaaaagagaagtttaatgagatggttgaatctggagtaagtgtgtgcattggcacatgctctatagttcttggtggactttgtagaaatggctgcagtagcgaagcgatcaccctgttccgaaaattaagcgcaatgaatgtgaaatttgatattacaattgtcaataccattattggtgccttctacagggtcgagagaaaccaagaggctaaggatttgtttgctgctattccagccaatggcttggttcctaattctgttacctacaccataatgatgacaaatcttataaaagaaggttcagtggaagaagctgacaatctttttttatcgatggagaatagcggctgtagtgccaactcttatctgttaaatcatgtcatcagaaggttactgcaaaaaggagagatagtcaaggctggaaattatatgtctaaagttgatgcaaagagcttttcacttgaagctaaaactgtttcactgctgatctctctgttttcaaggaaagggaaatatagagaacacatcaaattgctgcctacaaagtatcagtttctggaagaagccacagttgaa

SEQ ID NO: 1595 - DNA, 2361 bp, Triticum aestivum; identical to SEQ ID NO: 1594

SEQ ID NO: 1596 - DNA, 2361 bp, Triticum aestivum; identical to SEQ ID NO: 1594

SEQ ID NO: 1597 - DNA, 2361 bp, Triticum aestivum; identical to SEQ ID NO: 1594

SEQ ID NO: 1598 - DNA, 2361 bp, Triticum aestivum; identical to SEQ ID NO: 1594

SEQ ID NO: 1599 - DNA, 2040 bp, Triticum aestivum
atggcccgggccttgccatcgccctcttcaaccgcatgtcccgaggcgctggtgcacgggtggtgtcgctgccgtgcaggccgcccggacttggtggttgccttctttggccgcctcctcagattggggctgtgcttgaatgtcatctccttgagcaacctcctcaaggggctctgccaggtcaagcgtacaaatgaggctgtggacttgctgctccaccggacacctgaactggactgtgtgcctaatgtcttctcgtacagcatcgtaatcaacggctgttttaaacaaggtgaagtagacaaagcgtgcaatctcttccatgggatgatccaactgggagttcaacctaatgtggtcatctacacctcaattatcgatgcactaagcaagtgcggagtcatggacaaggcagaagtggtctttcggcaaatggttgataaaggtattggacccgatgtcatgacatgcactagtctgatccatggatattccatttcgggtaggtggaaggcggcagtaagggtattcaaagagatgataagtcttggtgttgtaccagataccgtcatgtggaactcatttgtggattcactttgcaagcatagaaggacaaaggaagctagagttatttttgactccatggctgcaaagggccagaaacctgatactgtctcctactctattatgcttaacgggtatgtgaaagaaggatgctttgatgatatgaccggtctcttcaattcgatgctacagaacggtgttgtacctaaccaccatattttcaacatactgatcaatgcatatgctaaacgtggactgatggatgaggctatgcacatgtttgaagtaatgaggcaacaaggagtaaacccagatgtagttgactatcaaattgtaatggattcactttgcaaaatgggtaggatggatgctgctctggacaaatttaatcagatggtcaatcaaggagtttcacctgacaaagctgtttaccgatgcctggttctgggttcttgctctcatggtgattttgtgaaagccaaggaattgatttctgaagcagttaatagaggtctctgttctaacagtgtgttcttctatcctgtaataaacgacctgtgcaaagaaggaaaggtgaaggaggcacaggatatgtttgacttcattgtaggtattggtcagcggcccgatgtgattatgtacaattcactgatggatggatattgccttgttggcaaggtggaggaagcactgagagtacttgatgctatgaagtctgctggcctccaacctgatgctattacgtatgctatacttcttaatggctactgtaaaattggcaggatcgccgatggattgagtcttttcagggaaatgtcactcctcggggttaagcccacgactattatgtacaacattatacttgatgggctgtttcgctccgggagaacagtttctgcaaaggaaaaattccgtacgatgagcgaaagtggcataccagtgggcgttgacacatacaacatagttcttcatggactttgtagaaacaattgcactgatgaagcaatagagctgttcaacaaattacgtgctatgaaattgaagattaatgtcataacactcaataccatgatttctgcaatgtttaaaactaggagaattgaagaagccaaggatttgtttgctactatatcagccattgggttggtgccttctgttgtgacttacagtgtaatgatgacgaatttcataaaagaagggttgttggcagaggctgatgatatgtttttagcaatggagaaggctagctgtgctcccgactccattctgctaaatcaagtggtcagggcgttgctggaaaaaggtgcagttgtgaaggctgcaacttatctcgctaaacttgatgctaaacagctgtcagttgaagcttcaacgatttccttaatagtatctctcttctcaggggaagggaaattaagggagcacgtacagttgcttccggtaaagtaccagcctcctgagagttcggctgacaat

SEQ ID NO: 1600 - DNA, 2334 bp, Triticum aestivum
atgccgaccggccggctgtcctccatcttcaccagcaatgcaacctcctccttcagggctccttcgccacagccacgagcccccctcgccgccttggctgccgccacggagcgcgtccgcgccggaacgctaagtcggcaggacgcgcaccacctgttcgacgaattgctgagccaagccgcgacagtcccagtacgcacgctcaacaattttcttgccgccctcgcccgtgctccgccctcagctgcctgtggcgatggccctgcccttgccatcgccctcttcaaccgcatgtcccaaggcgctggtgcacgggtggtgtcgcccacgctctgtacctattccatcctcatggactgctgctgccgcgcaggccgcccggacttggtggttgccttcttcggccgcctcatcaggttggggctgcgcttgaatgtcatccccttcaacaacctcctcaaggggctttgcaaggccaagcgctcaaatgaggcattggatctgctgctccaccggatgcccgaactggactgtgcgcctgatgtcttctcgtacagcatagtaatcaacggctgttttaaagaaggtgaagtagacaaagcgtgcaatctcttccatgggatgatccaactgggagttcaacctaatgtggtcatctacacctcaattatcgatgcactaagcaagtgcggagccatggacaaggcagaagtggtctttcggcaaatggttgataaaggtattggacccgatgtcatgacatgcactagtctgatccatggatattccatttcgggtaggtggaaggcggcagtaagggtattcaaagagatgataagtcttggtgttgtaccagataccgtcatgtggaactcatttgtggattcactttgcaagcatagaaggacaaaggaagctagagttatttttgactccatggctgcaaagggccagaaacctgatactgtctcctactctattatgcttaacgggtatgtgaaagaaggatgctttgatgatatgaccggtctcttcaattcgatgctacagaacggtgttgtacctaaccaccatattttcaacatactgatcaatgcatatgctaaacgtggactgatggatgaggctatgcacatgtttgaagtaatgaggcaacaaggagtaaacccagatgtagttgactatcaaattgtaatggattcactttgcaaaatgggtaggatggatgctgctctggacaaatttaatcagatggtcaatcaaggagtttcacctgacaaagctgtttaccgatgcctggttctgggttcttgctctcatggtgattttgtgaaagccaaggaattgatttctgaagcagttaatagaggtctctgttctaacagtgtgttcttctatcctgtaataaacgacctgtgcaaagaaggaaaggtgaaggaggcacaggatatgtttgacttcattgtaggtattggtcagcggcccgatgtgattatgtacaattcactgatggatggatattgccttgttggcaaggtggaggaagcactgagagtacttgatgctatgaagtctgctggcctccaacctgatgctattacgtatgctatacttcttaatggctactgtaaaattggcaggatcgccgatggattgagtcttttcagggaaatgtcactcctcggggttaagcccacgactattatgtacaacattatacttgatgggctgtttcgctccgggagaacagtttctgcaaaggaaaaattccgtacgatgagcgaaagtggcataccagtgggcgttgacacatacaacatagttcttcatggactttgtagaaacaattgcactgatgaagcaatagagctgttcaacaaattacgtgctatgaaattgaagattaatgtcataacactcaataccatgatttctgcaatgtttaaaactaggagaattgaagaagccaaggatttgtttgctactatatcagccattgggttggtgccttctgttgtgacttacagtgtaatgatgacgaatttcataaaagaagggttgttggcagaggctgatgatatgtttttagcaatggagaaggctagctgtgctcccgactccattctgctaaatcaagtggtcagggcgttgctggaaaaaggtgcagttgtgaaggctgcaacttatctcgctaaacttgatgctaaacagctgtcagttgaagcttcaacgatttccttaatagtatctctcttctcaggggaagggaaattaagggagcacgtacagttgcttccggtaaagtaccagcctcctgagagttcggctgacaat

SEQ ID NO: 1601 - DNA, 2040 bp, Triticum aestivum
atggcccgggccttgccatcgccctcttcaaccgcatgtcccgaggcgctggtgcacgggtggtgtcgctgccgtgcaggccgcccggacttggtggttgccttctttggccgcctcctcagattggggctgtgcttgaatgtcatctccttgagcaacctcctcaaggggctctgccaggtcaagcgtacaaatgaggctgtggacttgctgctccaccggacacctgaactggactgtgtgcctaatgtcttctcgtacagcatcgtaatcaacggctgttttaaacaaggtgaagtagacaaagcgtgcaatctcttccatgggatgatccaactgggagttcaacctaatgtggtcatctacacctcaattatcgatgcactaagcaagtgcggagccatggacaaggcagaagtggtctttcggcaaatggttgataaaggtattggacccgatgtcatgacatgcactagtctgatccatggatattccatttcgggtaggtggaaggcggcagtaagggtattcaaagagatgataagtcttggtgttgtaccagataccgtcatgtggaactcatttgtggattcactttgcaagcatagaaggacaaaggaagctagagttatttttgactccatggctgcaaagggccagaaacctgatactgtctcctactctattatgcttaacgggtatgtgaaagaaggatgctttgatgatatgaccggtctcttcaattcgatgctacagaacggtgttgtacctaaccaccatattttcaacatactgatcaatgcatatgctaaacgtggactgatggatgaggctatgcacatgtttgaagtaatgaggcaacaaggagtaaacccagatgtagttgactatcaaattgtaatggattcactttgcaaaatgggtaggatggatgctgctctggacaaatttaatcagatggtcaatcaaggagtttcacctgacaaagctgtttaccgatgcctggttctgggttcttgctctcatggtgattttgtgaaagccaaggaattgatttctgaagcagttaatagaggtctctgttctaacagtgtgttcttctatcctgtaataaacgacctgtgcaaagaaggaaaggtgaaggaggcacaggatatgtttgacttcattgtaggtattggtcagcggcccgatgtgattatgtacaattcactgatggatggatattgccttgttggcaaggtggaggaagcactgagagtacttgatgctatgaagtctgctggcctccaacctgatgctattacgtatgctatacttcttaatggctactgtaaaattggcaggatcgccgatggattgagtcttttcagggaaatgtcactcctcggggttaagcccacgactattatgtacaacattatacttgatgggctgtttcgctccgggagaacagtttctgcaaaggaaaaattccgtacgatgagcgaaagtggcataccagtgggcgttgacacatacaacatagttcttcatggactttgtagaaacaattgcactgatgaagcaatagagctgttcaacaaattacgtgctatgaaattgaagattaatgtcataacactcaataccatgatttctgcaatgtttaaaactaggagaattgaagaagccaaggatttgtttgctactatatcagccattgggttggtgccttctgttgtgacttacagtgtaatgatgacgaatttcataaaagaagggttgttggcagaggctgatgatatgtttttagcaatggagaaggctagctgtgctcccgactccattctgctaaatcaagtggtcagggcgttgctggaaaaaggtgcagttgtgaaggctgcaacttatctcgctaaacttgatgctaaacagctgtcagttgaagcttcaacgatttccttaatagtatctctcttctcaggggaagggaaattaagggagcacgtacagttgcttccggtaaagtaccagcctcctgagagttcggctgacaat

SEQ ID NO: 1602 - DNA, 2715 bp, Triticum aestivum
atgcatcaaggcgttggatgcactgacccgagcggacggggacaaaatccacgcccgtcggcaacctctcacccctccctctccgttcacagtctagattcgtccgccgcctcccaggccgcycgccggcggccaggaccaccggagttcctgagtctcctttctctccgacggaggcacgcctcctcttcatcgccactgttgagggcatcggttgcaaccccgcggcggcggcgagcggttcccccgagtgcttggttagtgccgagcatcgcgggtgacgccactagagcgcggtgcggcggcgcacgcacggtcagccttcccggagggcaagacccgcggcagttgcgcgccgagctccgctggagacggccagcaatgccgaccggccggctgtcctccatcttcaccagcaatgcaacctcctccttcagggctccttcgccacagccacgagcccccctcgccgccttggctgccgccacggagcgcgtccgcgccggaacgctaagtcggcaggacgcgcaccacctgttcgacgaattgctgagccaagccgcgacagtcccagtacgcacgctcaacaattttcttgccgccctcgcccgtgctccgccctcagctgcctgtggcgatggccctgcccttgccatcgccctcttcaaccgcatgtcccaaggcgctggtgcacgggtggtgtcgcccacgctctgtacctattccatcctcatggactgctgctgccgcgcaggccgcccggacttggtggttgccttcttcggccgcctcatcaggttggggctgcgcttgaatgtcatccccttcaacaacctcctcaaggggctttgcaaggccaagcgctcaaatgaggcattggatctgctgctccaccggatgcccgaactggactgtgcgcctgatgtcttctcgtacagcatagtaatcaacggctgttttaaagaaggtgaagtagacaaagcgtgcaatctcttccatgggatgatccaactgggagttcaacctaatgtggtcatctacacctcaattatcgatgcactaagcaagtgcggagccatggacaaggcagaagtggtctttcggcaaatggttgataaaggtattggacccgatgtcatgacatgcactagtctgatccatggatattccatttcgggtaggtggaaggcggcagtaagggtattcaaagagatgataagtcttggtgttgtaccagataccgtcatgtggaactcatttgtggattcactttgcaagcatagaaggacaaaggaagctagagttatttttgactccatggctgcaaagggccagaaacctgatactgtctcctactctattatgcttaacgggtatgtgaaagaaggatgctttgatgatatgaccggtctcttcaattcgatgctacagaacggtgttgtacctaaccaccatattttcaacatactgatcaatgcatatgctaaacgtggactgatggatgaggctatgcacatgtttgaagtaatgaggcaacaaggagtaaacccagatgtagttgactatcaaattgtaatggattcactttgcaaaatgggtaggatggatgctgctctggacaaatttaatcagatggtcaatcaaggagtttcacctgacaaagctgtttaccgatgcctggttctgggttcttgctctcatggtgattttgtgaaagccaaggaattgatttctgaagcagttaatagaggtctctgttctaacagtgtgttcttctatcctgtaataaacgacctgtgcaaagaaggaaaggtgaaggaggcacaggatatgtttgacttcattgtaggtattggtcagcggcccgatgtgattatgtacaattcactgatggatggatattgccttgttggcaaggtggaggaagcactgagagtacttgatgctatgaagtctgctggcctccaacctgatgctattacgtatgctatacttcttaatggctactgtaaaattggcaggatcgccgatggattgagtcttttcagggaaatgtcactcctcggggttaagcccacgactattatgtacaacattatacttgatgggctgtttcgctccgggagaacagtttctgcaaaggaaaaattccgtacgatgagcgaaagtggcataccagtgggcgttgacacatacaacatagttcttcatggactttgtagaaacaattgcactgatgaagcaatagagctgttcaacaaattacgtgctatgaaattgaagattaatgtcataacactcaataccatgatttctgcaatgtttaaaactaggagaattgaagaagccaaggatttgtttgctactatatcagccattgggttggtgccttctgttgtgacttacagtgtaatgatgacgaatttcataaaagaagggttgttggcagaggctgatgatatgtttttagcaatggagaaggctagctgtgctcccgactccattctgctaaatcaagtggtcagggcgttgctggaaaaaggtgcagttgtgaaggctgcaacttatctcgctaaacttgatgctaaacagctgtcagttgaagcttcaacgatttccttaatagtatctctcttctcaggggaagggaaattaagggagcacgtacagttgcttccggtaaagtaccagcctcctgagagttcggctgacaat

SEQ ID NO: 1603 - DNA, 2040 bp, Triticum aestivum; identical to SEQ ID NO: 1599

SEQ ID NO: 1604 - DNA, 2334 bp, Triticum aestivum; identical to SEQ ID NO: 1600

SEQ ID NO: 1605 - DNA, 1197 bp, Triticum aestivum
atgcacaaggcagagttgttccttcggcagatggttcataacggtgttcgaccggatgaggtgacatatactagcatgatccatggatattccactttgggccggctgaaagaggtgcgtaaaattttcagagaaatgacaagccgtggtcttataccagatattgtcacttggaactcgttcatggactccctttgcaagcatggaagaaccaaagaagctgcaaaggttttcttttccatggctgcaaagggcaacaagcctaatattgtctcctacactattcttcttcatgggtatgccaatgaaggaagctttgctgatatgatgagtctcttcaattcaatgaaaggcggtggcattgtagccaactgcaaagttttcaacatattaattggtgcatatgctaaacgagggctgatagatgaagctatgctcatacttactgaaatgcggggacaaggactgagtccggatgtagtcacctattcaactctaatatctgcactttggagaatgggtaagctgactgatgctatggataggttcagtcagatggttgttggtacgggagtacagccggacacagttgtttatcactccctagttcagttcttatgtacacatggtgatttggtgaaagcgaaggagttgatttctgaaatgatgaataaaggtattgctcgtccaaacactgcactcttcagttcaataatggacagtctacgcaatgaaggaagggttatagatgcacaccatatctttgacttggttatagacataggtgagaaacctgatagcagtatgtttagtacgctgattgacggatattgcttagtcggtgagatggacaaagcatgtggagtacttgatgccatggtatcagctggcattgagcctaatgtcattacgtatagcacacttgtcagtagatattgtaaacgtggaaggatcgctaatgggttgattctgttcagacaaatgttgcataagaaagttaaacctacaactgttacatatgaaaccatactgaatggattatttcgtgctgggagaactgctgatgcgaagaaaatcttcgatgagatgatcgaaagtggaataatggtgagcatttctacatataatataattcttggaggactttgtagaaataattgcgcagatgaagcgattgtcctattccagaacgtgcaa

SEQ ID NO: 1606 - DNA, 876 bp, Triticum aestivum
atgtccagcatccacctccgccactgctccactatgcccatgccccgcgtctgcctccgccgccgcctctcctcctccttctcctcctccttctccaactgcacctcgccgccctcaccaccctggtctccccacgcagcctttgccgcggccacagagcgcgtacgagccgggacgctcagcccgcaagacgcacaccacctgttcgacgtattgtttcagcaggccactcgggtccccgagcgctcccttgatggattccttgccgccctcggcggtgctgcgtcctctgaagcctgcagagacggccccgccctcgccctcgcccttttcaaccgtatcttccgagaagaagccggcatgcgggtggcgccgcccaccatcttcacttatggcatcctcatgaactgctgctgccgcgtacgtcgtccggacctagggcttgccttctttgggcgcatccttagggcgggcctgaagacaaaccagatcgcggccaacacggtcatcaagtgcctctgctgcgcaaaacatactgacgaggctgtcaatatgctgcttcataggatgtccgacctaggctgtgtgcctgatgacttctcatacaacacagttctgaagagcttgtgtgaagacggcaggagcttgcaggcgcttgacctactgctccagatggtgtccaaggaaggaggtgcctgctcccctgacacggtggcatatagcacggtcatccacggcttcttgaaggaaggcaaagtagacaaggcatgcaatctattcaatgaaatgatgcggcaaggggttgtgcctgatgtggtgacctatgtttttaaggcggtaaggcgaggcgaggcgctgggggggcgcctcactgcc

SEQ ID NO: 1607 - DNA, 1197 bp, Triticum aestivum; identical to SEQ ID NO: 1605

SEQ ID NO: 1608 - DNA, 2499 bp, Triticum aestivum
atgtccagcatccacctccgccactgctccactatgcccatgccccgcgtctgcctccgccgccgcctctcctcctccttctcctcctccttctccaactgcacctcgccgccctcaccaccctggtctccccacgcagcctttgccgcggccacagagcgcgtacgagccgggacgctcagcccgcaagacgcacaccacctgttcgacgtattgtttcagcaggccactcgggtccccgagcgctcccttgatggattccttgccgccctcggcggtgctgcgtcctctgaagcctgcagagacggccccgccctcgccctcgcccttttcaaccgtatcttccgagaagaagccggcatgcgggtggcgccgcccaccatcttcacttatggcatcctcatgaactgctgctgccgcgtacgtcgtccggacctagggcttgccttctttgggcgcatccttagggcgggcctgaagacaaaccagatcgcggccaacacggtcatcaagtgcctctgctgcgcaaaacatactgacgaggctgtcaacatgctgcttcataggatgtccgacctaggctgtgtgcctgatgacttctcatacaacacagttctgaagagcttgtgtgaagacggcaggagcttgcaggcgcttgacctactgctccagatggtgtccaaggaaggaggtgcctgctcccctgacacggtggcatatagcacggtcatccacggcttcttgaaggaaggcaaagtagacaaggcatgcaatctattcaatgaaatgatgcggcaaggggttgtgcctgatgtggtgacgtatagctcgattatcgatgcattgtgcaaagccggagcaatgcacaaggcagagttgttccttcggcagatggttcataacggtgttcgaccggatgaggtgacatatactagcatgatccatggatattccactttgggccggctgaaagaggtgcgtaaaattttcagagaaatgacaagccgtggtcttataccagatattgtcacttggaactcgctcatggactccctttgcaagcatggaagaaccaaagaagctgcaaaggttttcttttccatggctgcaaagggcaacaagcctaatattgtctcctacactattcttcttcatgggtatgccaatgaaggaagctttgctgatatgatgagtctcttcaattcaatgaaaggcggtggcattgtagccaactgcaaagttttcaacatattaattggtgcatatgctaaacgagggctgatagatgaagctatgctcatacttactgaaatgcggggacaaggactgagtccggatgtagtcacctattcaactctaatatctgcactttggagaatgggtaagctgactgatgctatggataggttcagtcagatggttgttggtacgggagtacagccggacacagttgtttatcactccctagttcagttcttatgtacacatggtgatttggtgaaagcgaaggagttgatttctgaaatgatgaataaaggtattgctcgtccaaacactgcactcttcagttcaataatggacagtctacgcaatgaaggaagggttatagatgcacaccatatctttgacttggttatagacataggtgagaaacctgatagcagtatgtttagtacgctgattgacggatattgcttagtcggtgagatggacaaagcatgtggagtacttgatgccatggtatcagctggcattgagcctaatgtcattacgtatagcacacttgtcagtagatattgtaaacgtggaaggatcgctaatgggttgattctgttcagacaaatgttgcataagaaagttaaacctacaactgttacatatgaaaccatactgaatggattatttcgtgctgggagaactgctgatgcgaagaaaatcttcgatgagatgatcgaaagtggaataatggtgagcatttctacatataatataattcttggaggactttgtagaaataattgcgcagatgaagcgattgtcctattccagaaattacgtgcaatgaatgtgaagttcaatatcacaacactcaataccatcattaatgcattgtacaaggttgaaagaagagaagaagctaatgatttgtttgctgcattaccagccagcgggttggtgcctaatgcttccacttacggagtaatggtacaaaatcttctaaaagaaggagcagtggaggaagctgacagtatgttctcatcaatggagaagagtggctgtgctcctagctctcgtcttataaatgatgtcatcagaactttattggaaaagggggagatagtcaaggctggaaaatatatgtctaaagttgatgggaagagcatctcacttgaagcttcaactagttcgttgttgttgtctctcttttcagggaatgggaaatatcggaaacaactacaattgctccctgcaaagtaccaattttttaaaggaatcagt

SEQ ID NO: 1609 - DNA, 876 bp, Triticum aestivum; identical to SEQ ID NO: 1606

SEQ ID NO: 1610 - DNA, 876 bp, Triticum aestivum; identical to SEQ ID NO: 1606

SEQ ID NO: 1611 - DNA, 2508 bp, Triticum aestivum
atgtccagcatccacctccgccactgctccactatgcccatgtcccgcgtctgcctccgccgccgcctctcctcctcctcctcctcctcctcctcctccttctccaactgcacctcgccgccctcaccaccctggtctccccacgccgcctttgccgcggccacagagcgcgtacgagccgggacgctcagcccgcaagacgcacaccacctgttcgacgtattgtttcagcaggccactcgggtccccgagcgctcccttgatggattccttgccgccctcggcggtgctgcgtcctccgaagcctgcagagacggccccgccctcgccctcgcccttttcaaccgtatcttccgagaagaagccggcatgcgggtggcgccgcccaccatcttcacctatggcatcctcatgaactgctgctgccgcgtacgtcgtccagacctagggcttgccttctttgggcgcatcctcagggcgggcctgaagacaaaccagatcgcggccaacaccgtcatcaagtgcctctgctacgcaaaacatactgacgaggctgtcaatatgctgcttcataggatgtccgacctcggctgtgtgcctgatgacttctcatacaacacagttctgaagagcttgtgtgaagacggcaggagcttgcaggcgcttgacctactgctccagatggtgtccaaggaaggaggtgcctgctcccctgacacggtggcatatagcacggtcatccatggcttcttgaaggaaggcaaagtagacaaggcatgcaatctattcaatgaaatgatgcggcaaggggttgtgcctgatgtggtgacgtatagctcgattatcgatgcattgtgcaaagccggagcaatgcacatggcagagttgttccttcggcagatggttgataacgatgttcgaccggatgaggtgacatatactagcatgatccatggatattccactttgggccggctgaaagaggtgcgtaaaatgttcagagaaatgacaagccgtggtcttataccagatattgtcacttggaactcgttcatagactccctttgcaagcatggaagaaccaaagaagctgcaaaggttttcttttccatggctgcaaagggcagcaagcctaatattgtctcctacactattcttcttcatgggtatgccaatgaaggaagctttgctgatatgatgagtctcttcaattcaatgaaaggcggtggcattgtagccaactgcaaagttttcaacatattaattggtgcatatgctaaacgagggctgatagatgaagctatgctcatacttactgaaatgcggggacaaggactgagtccagatgtattcacctattcaactctaatatctgcacattggagaatgggtaagctgactgatgccatggataagttcagtcagatggttgttggtacgggagtacagccggacgcagttgtttatcactccctagttcagttcttatgtacacatggtgatttggtgaaagcgaaggagttgctttctgaaatgatgaataaaagtattgctcgtccaaacactgcactcttcagttcaataatggacagtctatgcaatgaaggaagggttatagatgcacaccatatctttgacttggttatagatataggtgagaaacctgatatcagtatgtttagtatgctgattgacggatattgcttagtcggtgagatggacaaagcatgtggagtacttgatgccatggtatcagctggcattgagcctaatgtcattacgtatagcacacttgtcagtagatattgtaaacgtggaaggatcgatgatgggttgattctgttcagacaaatgttgcataagaaagttaaacctacaactgttacatatgaaaccatactgaatggattatttcgtgctgggagaactgttgatgcgaagaaaatcttcgatgagatgatcgaaagtggaataatggtgagcatttctacatataatataattcttggaggactttgtagaaataattgcgcagatgaagcgatcgtcctattccagaaattacgtgcaatgaatgtgaagttcaatatcacaacactcaataccatcattaatgcattgtacaaggttgaaagaagagaagaagctaatgatttgtttgctgcattaccagccagcgggttggtgcctaatgcttccacttacggagtaatggtacaaaatcttctaaaagaaggagcagtggaggaagctgacagtatgttctcatcaatggagaagactggctgtgctcctagctctcgtcttataaatgatgtcatcagaactttgttggaaaagggggagatagttaaggccggaaaatatatgtctaaagttgatgggaagagcatctcacttgaagcttcaactagttcgttgttgttgtctctcttttcagggaatgggaaatatcggaaacaactacaattgctccctgcaaagtaccaattttttgaaggaatcagt

SEQ ID NO: 1612 - DNA, 1197 bp, Triticum aestivum; identical to SEQ ID NO: 1605

SEQ ID NO: 1613 - DNA, 1197 bp, Triticum aestivum; identical to SEQ ID NO: 1605

SEQ ID NO: 1614 - DNA, 876 bp, Triticum aestivum; identical to SEQ ID NO: 1606

SEQ ID NO: 1615 - DNA, 2499 bp, Triticum aestivum; identical to SEQ ID NO: 1608

SEQ ID NO: 1616 - DNA, 2472 bp, Triticum aestivum
atgccccgtctccgcctccgccgcttctccaccgcgccgatgttccacctcctccaccgcagctcctcctccacctccacctcgccgccctcgcgttcctggtctccccatgccgcctttgccgccgccacagagcgtgtccgtgccgggacgctcagcccagaagacgcgcaccacctgttcgacgaattgctacggcaggccaccccggtcaccgggcgctccctcaacggcttcctttccgccctcgcccgtgcgcccgcctcggccgcctgcattagagatggccccgcccttgccgtcgctctcttcaaccgcgtatgccgagaagaagccagccagcaggtggcacctttgacagtccacacctacggcatcctcatgggctgcttctgcggtgcgcgtcgcccggacctagggcttgccttattcggccgcttcctcaggacgggcctgaagacaaatgagatcatcgccaccaccttcctcaagtgcctctgctccgccaaacgtacagatgaggctgtcaacttgctgcttcataggatgcctgagcttggctgcgtgcctaatgcaatctcctactccattgttctgaagagcttatgtgaaaatagcatgagtcagcgggcactcgacttgctacagactgtggcggaaggaggaggtgcctgctctctcaatgtggtggcatatagcacagtcatccatggtttttttaaagaaggcaaaacaggcaaggcatgcaatctattccatgaaatgatacatcaaggggttgatcctgatgtggtgacgtacaacttgatcattgatgcattgtgcaaggccagagcgatggacaaggcagaactagtccttcagcagatggtcgataaaggtgttcaacccaacacagtgacatataattgcatgatccatggatattccacatcagggcagttgaaagaggctgctaaaatgtttagaaaaatgacaagccatggtcttgtaccaaatgcagtcacttgcaacttgttaatgacttccctttgcaagcatggaagaagcaaagaagcggcagaaatattttattccatgactgccaagggccacaaactggatgccgtctcgtaccgtattttgcttcatgggtatgccactgagggatgctttgctgatatgattgatctcttcaattcaatggaaagcaatggttttgtagccgattgccatgttttcaccatattaattgatgcatatgctaaacgtggaatgatggatgaagctatgctcatatttactgaaatgcgggaaaaaggagtgagtcccaatgtagtcacctattccactgtaatagccgcattttgcagattgcgtaggctggccaatgctatggacaagttcaatgagatgactgatatgggtgttcagccggacacaactgtttatcactccctaattcagggtttttgtatgcatggtgatttggttaaagttaaggaatttgtgtctgaaatgatgaacaaaggtattcctcgtcctgacattgcgttcttcaattcagtaataaactctttatgcaaagaaggaagggttatgaatgcacaaggtatctttgacttggttataggcatgggcgagaggcctaatgtcattacattcagttcactgattgacggatatggcttagtcggccagatgggtgaagcactcggagtgcttgatgccatggtgtcagctggcattgagcctaatgttgttacgtatagttcaattcttgatggctattgtagaaatggaaggatcaatgatgctttgattctattcagagaaatgccgcgcaagagaattaaacctaacactgttacatatggcatcatgctggatgggttgttccgtgctgggagaactgttgctgcaagggaaatgttccatgagatgaccgaaaggggtataccagtgagcatttccatatacaatataatacttggtggtctttgtagaaataattgtgcagacgaagcgatcacactattccagaaattaggagcaatgaatgtcaagttcgatattataacactcaataccatgattaatgcaatgttcaaggttcggagaagagaagaagctaacgatttgtttgctgcagtatcagccagtgggttggtgcctaatgcttctacttacggcatagtgataaaaaatattctaaaggaaggatcagtggaagaagttgacaatatgttttcatcaatggagaagagtggttgtgctcccagctctcgtcttataaattatatcatcagaatgttgttggaaaaaggtgagattgccagggccgggaattatttatctaaagttgatgggaagatcatctcacttgaagcttcaactacttctttgctgttgtctctcttttcaagggaagggaaatatcgggaaaacattgaattgcttcctgcaaagtatcaatttttcaatggatttggt

SEQ ID NO: 1617 - DNA, 1791 bp, Triticum aestivum
atgtggtggcatatagcacagtcatccatggttttttttaaagaaggcaaaacaggcaaggcatgcaatctattccatgaaatgatacatcaaggggttgatcctgatgtggtgacgtacaacttgatcattgatgcattgtgcaaggccagagcgatggacaaggcagaactagtccttcagcagatggtcgataaaggtgttcaacccaacacagtgacatataattgcatgatccatggatattccacatcagggcagttgaaagaggctgctaaaatgtttagaaaaatgacaagccatggtcttgtaccaaatgcagtcacttgcaacttgttaatgacttccctttgcaagcatggaagaagcaaagaagcggcagaaatattttattccatgactgccaagggccacaaactggatgccgtctcgtaccgtattttgcttcatgggtatgccactgagggatgctttgctgatatgattgatctcttcaattcaatggaaagcaatggttttgtagccgattgccatgttttcaccatattaattgatgcatatgctaaacgtggaatgatggatgaagctatgctcatatttactgaaatgcgggaaaaaggagtgagtcccaatgtagtcacctattccactgtaatagccgcattttgcagattgcgtaggctggccaatgctatggacaagttcaatgagatgactgatatgggtgttcagccggacacaactgtttatcactccctaattcagggtttttgtatgcatggtgatttggttaaagttaaggaatttgtgtctgaaatgatgaacaaaggtattcctcgtcctgacattgcgttcttcaattcagtaataaactctttatgcaaagaaggaagggttatgaatgcacaaggtatctttgacttggttataggcatgggcgagaggcctaatgtcattacattcagttcactgattgacggatatggcttagtcggccagatgggtgaagcactcggagtgcttgatgccatggtgtcagctggcattgagcctaatgttgttacatatagttcaattcttgatggctattgtagaaatggaaggatcaatgatgctttgattctattcagagaaatgccgcgcaagagaattaaacctaacactgttacatatggcatcatgctggatgggttgttccgtgctgggagaactgttgctgcaagggaaatgttccatgagatgaccgaaaggggtataccagtgagcatttccatatacaatataatacttggtggtctttgtaaaaataattgtgcagacgaagcgatcgcactattccagaaattaggagcaatgaatgtcaagttcgatattataacactcaataccatgattaatgcaatgttcaaggttcggagaagagaagaagctaacgatttgtttgctgcagtatcagccagtgggttggtgcctaatgcttctacttacggcatagtgataaaaaatattctaaaggaaggatcagtggaagaagttgacaatatgttttcatcaatggagaagagtggttgtgctcccagctctcgtcttataaattatatcatcagaatgttgttggaaaaaggtgagattgccagggccgggaattatttatctaaagttgatgggaagatcatctcacttgaagcttcaactacttctttgctgttgtctctcttttcaagggaagggaaatatcgggaaaacattgaattgcttcctgcaaagtatcaatttttcaatggatttggt

SEQ ID NO: 1618 - DNA, 1068 bp, Triticum aestivum
atgttatttcctgatgaatttttgcaaactaacaaaaaaatttgtcaaagtttggcacggaaaattttcagagtttttggaatttatttaccttttttaaaattttattttactgtttataagagagcatttgagatcgggactggatactcctcgtcccggccattctccctttctcagtgcagagccagagcacgcccatgtctcgcatccccatccgccgccgccgccgctcatcgtcctccacctagacagtgtccggcctccaccactcctcctcctcctccacctagccattctccgacctctgcctccgccacttctcctcccctgtcccccacctcgccgatgccccgtctccgcctccgccgcttctccaccgcgccgatgttccacctcctccaccgcagctcctcctccacctccacctcgccgccctcgcgttcctggtctccccatgccgcctttgccgccgccacagagcgtgtccgtgccgggacgctcagcccagaagacgcgcaccacctgttcgacgaattgctacggcaggccaccccggtcaccgggcgctccctcaacggcttcctttccgccctcgcccgtgcgcccgcctcggcctcctgcattagagatggccccgcccttgccgtcgctctcttcaaccgcgtatgccgagaagaagccagccagcaggtggcacctttgacagtccacacctacggcatcctcatgggctgcttctgcggtgcgcgtcgcccggacctagggcttgccttattcggccgcttcctcaggaagggcctgaagacaaatgagatcatcgccaccaccttcctcaagtgcctctgctccgccaaacgtacagatgaggctgtcaacttgctgcttcataggatgcctgagcttggctgcgtgcctaatgcaatctcctactccattgttctgaagagcttatgtgaaaatagcatgagtcagcgggcactcgacttgctacagactgtggcggaaggaggaggtgcctgctctctcaatgtggtggcatatagcacagtcatccatggttttttt

SEQ ID NO: 1619 - DNA, 579 bp, Triticum aestivum
atgatagttcggctgtccggacaccccctagtccgggactccctcaatgaggctgtcaacttgctgcttcataggatgcctgagcttggctgcgtgcctaatgcaatctcctactccattgttctgaagagcttatgtgaaaatagcatgagtcagcgggcactcaacttgctacagacagtggcggaaggaggaggtgcctgctctctcaatgtggtggcatataacacagtcatccatggtatttttaaagaaggcaaaacaggcaaggcatgcaatctattccatgaaatgatacatcaaggggttgatcctgatgtggtgacgtacaacttgatcattgatgcattgtgcaaggccagagcgatggacaaggcagaactagtccttcagcagatggtcgataaaggtgttcaacccaacacagtgacatataattgcatgatccatggatattccacatcagggcagttgaaagaggctgctaaaatgtttagaaaaatgacaagccatggtcttgtaccaaatgcagtcacttgcaactcgttaatgacttccctttgcaagcatggaagaagc

SEQ ID NO: 1620 - DNA, 2472 bp, Triticum aestivum
atgccccgtctccgcctccgccgcttctccaccgcgccgatgttccacctcctccaccgcagctcctcctccacctccacctcgccgccctcgcgttcctggtctccccatgccgcctttgccgccgccacagagcgtgtccgtgccgggacgctcagcccagaagacgcgcaccacctgttcgacgaattgctacggcaggccaccccggtcaccgggcgctccctcaacggcttcctttccgccctcgcccgtgcgcccgcctcggccgcctgcattagagatggccccgcccttgccgtcgctctcttcaaccgcgtatgccgagaagaagccagccagcaggtggcacctttgacagtccacacctacggcatcctcatgggctgcttctgcggtgcgcgtcgcccggacctagggcttgccttattcggccgcttcctcaggacgggcctgaagacaaatgagatcatcgccaccaccttcctcaagtgcctctgctccgccaaacgtacagatgaggctgtcaacttgctgcttcataggatgcctgagcttggctgcgtgcctaatgcaatctcctactccattgttctgaagagcttatgtgaaaatagcatgagtcagcgggcactcgacttgctacagactgtggcggaaggaggaggtgcctgctctctcaatgtggtggcatatagcacagtcatccatggtttttttaaagaaggcaaaacaggcaaggcatgcaatctattccatgaaatgatacatcaaggggttgatcctgatgtggtgacgtacaacttgatcattgatgcattgtgcaaggccagagcgatggacaaggcagaactagtccttcagcagatggtcgataaaggtgttcaacccaacacagtgacatataattgcatgatccatggatattccacatcagggcagttgaaagaggctgctaaaatgtttagaaaaatgacaagccatggtcttgtaccaaatgcagtcacttgcaacttgttaatgacttccctttgcaagcatggaagaagcaaagaagcggcagaaatattttattccatgactgccaagggccacaaactggatgccgtctcgtaccgtattttgcttcatgggtatgccactgagggatgctttgctgatatgattgatctcttcaattcaatggaaagcaatggttttgtagccgattgccatgttttcaccatattaattgatgcatatgctaaacgtggaatgatggatgaagctatgctcatatttactgaaatgcgggaaaaaggagtgagtcccaatgtagtcacctattccactgtaatagccgcattttgcagattgcgtaggctggccaatgctatggacaagttcaatgagatgactgatatgggtgttcagccggacacaactgtttatcactccctaattcagggtttttgtatgcatggtgatttggttaaagttaaggaatttgtgtctgaaatgatgaacaaaggtattcctcgtcctgacattgcgttcttcaattcagtaataaactctttatgcaaagaaggaagggttatgaatgcacaaggtatctttgacttggttataggcatgggcgagaggcctaatgtcattacattcagttcactgattgacggatatggcttagtcggccagatgggtgaagcactcggagtgcttgatgccatggtgtcagctggcattgagcctaatgttgttacgtatagttcaattcttgatggctattgtagaaatggaaggatcaatgatgctttgattctattcagagaaatgccgcgcaagagaattaaacctaacactgttacatatggcatcatgctggatgggttgttccgtgctgggagaactgttgctgcaagggaaatgttccatgagatgaccgaaaggggtataccagtgagcatttccatatacaatataatacttggtggtctttgtagaaataattgtgcagacgaagcgatcacaatattccagaaattaggagcaatgaatgtcaagttcgatattataacactcaataccatgattaatgcaatgttcaaggttcggagaagagaagaagctaacgatttgtttgctgcagtatcagccagtgggttggtgcctaatgcttctacttacggcatagtgataaaaaatattctaaaggaaggatcagtggaagaagttgacaatatgttttcatcaatggagaagagtggttgtgctcccagctctcgtcttataaattatatcatcagaatgttgttggaaaaaggtgagattgccagggccgggaattatttatctaaagttgatgggaagatcatctcacttgaagcttcaactacttctttgctgttgtctctcttttcaagggaagggaaatatcgggaaaacattgaattgcttcctgcaaagtatcaatttttcaatggatttggt

SEQ ID NO: 1621 - DNA, 1017 bp, Triticum aestivum
atgcatggtgatttggttaaagttaaggaatttgtgtctgaaatgatgaacaaaggtattcctcgtcctgacattgcgttcttcaattcagtaataaactgtttatgcaaagaaggaagggttatgaatgcacaaggtatctttgacttggttataggcatgggcgagaggcctaatgtcattacattcagttcactgattgacggatatggcttagtcggccagatgggtgaagcactcggagtgcttgatgccatggtgtcagctggcattgagcctaatgttgttatgtatagttcaattcttgatggctattgtagaaatggaaggatcaatgatgctttgattctattcagagaaatgccgcgcaagagaattaaacctaacactgttacatatggcatcatgctggatgggttgttccgtgctgggagaactgttgctgcaagggaaatgttccatgagatgaccgaaaggggtatatcagtgagcatttccatatacaatataatacttagtggtctttgtagaaataattgtgcagacgaagcgatcgcactattccagaaattaggagcaatgaatgtcaagttcgatattataacactcaataccatgattaatgcaatgttcaaggttcggagaagagaagaagctaacgatttgtttgctgcagtatcagccagtgggttggtgcctactgcttctacttatggcatagtgataaaaaatattctaaaggaaggatcagtggaagaagttgacaatatattttcatcaatggagaagagtggttgtgctcccagctctcgtcttataaattatatcatcagaatgttgttggaaaaaggtgagattgccagggccgggaattatttatctaaagttgatgggaagatcatctcacttgaagcttcaactacttctttgttgttgtccctcttttcaagggaagggaaatatcgggaaaacattgaattgcttcctgcaaagtatcaatttttcaatggatttggt

SEQ ID NO: 1622 - DNA, 1068 bp, Triticum aestivum; identical to SEQ ID NO: 1618

SEQ ID NO: 1623 - DNA, 1791 bp, Triticum aestivum; identical to SEQ ID NO: 1617

SEQ ID NO: 1624 - DNA, 1791 bp, Triticum aestivum; identical to SEQ ID NO: 1617

SEQ ID NO: 1625 - DNA, 1068 bp, Triticum aestivum; identical to SEQ ID NO: 1618

SEQ ID NO: 1626 - DNA, 2472 bp, Triticum aestivum; identical to SEQ ID NO: 1616

SEQ ID NO: 1627 - DNA, 1227 bp, Triticum aestivum
atggtatcgtacggaatggatgaggctatgcacatgttcgaagtaatgaggcaacaaggagtaaacccagatgtatttggctatcaaatcataatggattcactttgcaaaatgggcaagatggctgctgctatggatatatttaatcagatggtcaatcaaggagtttcacctaacaaagctgtttaccaatgcctggttctgggttcttgctctcatggtcattttgtgaaagccaaggaattgatttctgaagcggttaatagaggtctgtgttctaacagtgtgttcttctatcctgtaataaacgaccgttgcaaagaaggaaaggtgaaggaggcacaggatatgtttgacttcattgtaggtattggtcatcggcctgatgtgattatgtacaattcactgatggatggatattgccatgttggcaaggtggaggaagcactgagagtacttgatgctatgaagtctgctggcctccaacctgatgtttttacatatggtatacttattaatggctactgtaaaattggaaggatcgacgagggattgagtcttgtcagggaaatttcactcagtggggttaagcccacgactattatgtacaacattatacttgatgggctgttttgctctgggagaacagttcctgcaaaggaaaaattccataagatgaatgaaagtggcataccagtgggcgttggaacatacaacatagttcttagtggactttgtaaaaataattgcactgatgaagcaatagagctgttcaagaaattacgtgctgtgaacgtgaagattaatgtcataacactcactaccatgatttctgcaatgtttaaaactaggagaattgaagaagccaaggatttgtttgctactatatcagccattgggttggtgccttctgttgtgacttacagtataatgatgacaaatttcataaaagaagggttgcttgcagatgctgatgatatgttttcagcaatggagaaggctggctgtgctcacaactccagactgctaaatcaagtggtcagggtatttctgaagaatggtgaagttgtaaaggctgtgacttatcttgccaaacttgatgcaaaacagctgtcagttgaagcttcgacggtttcgttaatagtatctctcttctcaaggaaagggaaattaagggagcatgtaaaattgcttccggtaaagtaccagcctcctgagatgttggac

SEQ ID NO: 1628 - DNA, 1227 bp, Triticum aestivum; identical to SEQ ID NO: 1627

SEQ ID NO: 1629 - DNA, 1227 bp, Triticum aestivum; identical to SEQ ID NO: 1627

SEQ ID NO: 1630 - DNA, 1398 bp, Triticum aestivum
atgacagccaagggccaaaaacctgatatcatctcgtattgtactttgcttcatgggcatgccagagaaggatgctttactgatatgattgatctctttaattcaatgaaaagcaatggtattgcagccgactgccatgttttcaccatattaattgatacctatgctaaacgcggaatgatggatgatgcaatgcacatatttacggaaatgcagcaacaaggtgtgagtccaaatgttgtcacatattcaactgtaatatcagcactttctagaatgggtaggttgaccgatgctatggaaaaatttaatcagatggttgccttgggagtacagccggatagagctatttatcagtccctaattcagggcttttgtatgcatggtggtttggttaaagctaaggagttggtttctcaaatgataaacaaaggtattcctcatcctaacattgtgttcttcaattcagtaataaacagtatgtgcaaggaaggcagggttatggatgcacatgatatctttgacttggttatagacataggtgataggcctgatgacacttcatttaattcactgattgatggatattgcttagtcgggaagatggataaagcattcggaatgcttaatgccatggaatcagttggtgttgagcctgatattgttacttacagtacacttgttaatggctattgtagaaatggaaggatcgatgatggtttgactctgtttagagaaatgatgtgcaagggagttaaacctacaactgtgacatatggcatcatactggatgggttgtttcattctgggagaactgttgctgcaatgaaaatgttccatcagatgattgaaagtggaacaacagtgaccatttccacgtacagtataatacttggaggtctttgtagaaataattgtgcagacgaagcgattgtcctgttccagaaattaggagcaatgattgtaaagttcagtattacaatactcaataccatgattaatgcaatgtacaaggttcaaagaaaagaagaagctaaggagttgttcggtacaatatcagccagtgggttggtgcctaatgaatgtacttatggagtaatgataaaaaatcttctggaagaaggatcagtggaagaagctgacaatatgttttcgtttatggacaggagtggtatagtccccagctcccgtcttatgaatgatatcatcagaatgttgttggaaaaaggtgagattgccaaggccggatattatctgtctaaagttgatggaaagagcatatcacttgaagcttcaactacttcattgatgttttctctcttttcaaggaaaagcaaatatcaggaggatatgaaattgctccctgcaaagtatcaaattttcgacggattagttgtc

SEQ ID NO: 1631 - DNA, 2619 bp, Triticum aestivum
atgtcccgccgcatccgccttcgccgcgcgctcctactccggctgaagtccggcctgcgccactcctttacctcgccgttttcccgcctccgcatccgcctccgccgctattccaccgcgccgatgtctcgcctccgtctccgcctcccccgcggcagctcctcccccaccacactgataccccgcctccggctcctccgccgctgctccacctccacctccatgtcgtcgccctcacgctcctggtctccccgagacgcctttgccgcggccacggagcgtgttcgcgccgggacgctcagcctggaagacgctcacaaactgttcgacgaattgctcggtcaggccaccccggtcccggagcgctccctgaacggcttccttgccgccctcgcccgcgcgcccgcctccggtgcctgcatcagagatggccccgcccttgcagtggctctcttcaaccgtgtgtgcagagaggaagccggcgcgcaggtggcggcgctcacagtttgcacctacaacatcctcatggactgctgctgccgtgcgcgtcgtccggacctagggcttgccttatttggctgcttcctcaggaagggcctgaagacagaccagaccggcgccaacaccttcctcaagtgcctctgctacgcgaaacggacggatgaggctgtgaacgtgctcctccacaggatgtccgagctcggctgtgtgcctaatgccgtttcgtacaacactgttctgaagggcttatgcgacaatagcatgagtcagcgggcgctcgacctgctccagatggtggcgggaaaaggaggtggctgcttccctgatgtggtggcgtatagcacggtcatccatggcttttttaaggagggtgaaacagggaaggcatgcagtctattccatgaaatgatgcagcaagggattgtgcccagtgtggtgacatataactcgattattgatgcgttgtgcaaggtcagagaagtggacaaggcagagctagtccttcgtcagatggttgctaaaggtgctcaacccgatacagtgacatataattgcatgatcaatggatatgccacatctgggcggttgaaagaggctgctaaaatgttcagagaaatgaaaagccggggtcttacaccaaatgttgttacttgcaactcgttcctggcctccctttgcaagcaccgaagtagcaaagaagctgcagaattttttgattccatgacagccaagggccaaaaacctgatatcatctcgtattgtactttgcttcatgggcatgccagagaaggatgctttactgatatgattgatctctttaattcaatgaaaagcaatggtattgcagccgactgccatgttttcaccatattaattgatacctatgctaaacgcggaatgatggatgatgcaatgcacatatttacggaaatgcagcaacaaggtgtgagtccaaatgttgtcacatattcaactgtaatatcagcactttctagaatgggtaggttgaccgatgctatggaaaaatttaatcagatggttgccttgggagtacagccggatagagctacttatcagtccctaattcagggcttttgtatgcatggtggtttggttaaagctaaggagttggtttctcaaatgataaacaaaggtattcctcatcctaacattgtgttcttcaattcagtaataaacagtatgtgcaaggaaggcagggttatggatgcacatgatatctttgacttggttatagacataggtgataggcctgatgacacttcatttaattcactgattgatggatattgcttagtcgggaagatggataaagcattcggaatgcttaatgccatggaatcagttggtgttgagcctgatattgttacttacagtacacttgttaatggctattgtagaaatggaaggatcgatgatggtttgactctgtttagagaaatgatgtgcaagggagttaaacctacaactgtgacatatggcatcatactggatgggttgtttcattctgggagaactgttgctgcaatgaaaatgttccatcagatgattgaaagtggaacaacagtgaccatttccacgtacagtataatacttggaggtctttgtagaaataattgtgcagacgaagcgattgtcctgttccagaaattaggagcaatgaatgtaaagttcagtattacaatactcaataccatgattaatgcaatgtacaaggttcaaagaaaagaagaagctaaggagttgttcggtacaatatcagccagtgggttggtgcctaatgaatgtacttatggagtaatgataaaaaatcttctggaagaaggatcagtggaagaagctgacaatatgttttcgtttatggacaggagtggtatagtccccagctcccgtctcatgaatgatatcatcagaatgttgttggaaaaaggtgagattgccaaggccggatattatctgtctaaagttgatggaaagagcatatcacttgaagcttcaactacttcattgatgttttctctcttttcaaggaaaagcaaatatcaggaggatatgaaattgctccctgcaaagtatcaaattttcgacggattagttgtc

SEQ ID NO: 1632 - DNA, 2619 bp, Triticum aestivum
atgtcccgccgcatccgccttcgccgcgcgctcctactccggctgaagtccggcctgcgccactcctttacctcgccgttttcccgcctccgcatccgcctccgccgctattccaccgcgccgatgtctcgcctccgtctccgcctcccccgcggcagctcctcccccaccacactgataccccgcctccggctcctccgccgctgctccacctccacctccacgtcgtcgccctcacgctcctggtctccccgagacgcctttgccgcggccacggagcgtgttcgcgccgggacgctcagcctggaagacgctcacaaactgttcgacgaattgctcggtcaggccaccccggtcccggagcgctccctgaacggcttccttgccgccctcgcccgcgcgcccgcctccggtgcctgcatcagagatggccccgcccttgcagtggctctcttcaaccgtgtgtgcagagaggaagccggcgcgcaggtggcggcgctcacagtttgcacctacaacatcctcatggactgctgctgccgtgcgcgtcgtccggacctagggcttgccttatttggctgcttcctcaggaagggcctgaagacagaccagaccggcgccaacaccttcctcaagtgcctctgctacgcgaaacggacggatgaggctgtgaacgtgctcctccacaggatgtccgagctcggctgtgtgcctaatgccgtttcgtacaacactgttctgaagggcttatgcgacaatagcatgagtcagcgggcgctcaacctgctccagatggtggcgggaaaaggaggtggctgcttccctgatgtggtggcgtatagcacggtcatccatggcttttttaaggagggtgaaacagggaaggcatgcagtctattccatgaaatgatgcagcaagggattgtgcccagtgtggtgacatataactcgattattgatgcgttgtgcaaggtcagagaagtggacaaggcagagctagtccttcgtcagatggttgctaaaggtgctcaacccgatacagtgacatataattgcatgatcaatggatatgccacatctgggcggttgaaagaggctgctaaaatgttcagagaaatgaaaagccggggtcttacaccaaatgttgttacttgcaactcgttcctggcctccctttgcaagcaccgaagtagcaaagaagctgcagaattttttgattccatgacagccaagggccaaaaacctgatatcatctcgtattgtactttgcttcatgggcatgccagagaaggatgctttactgatatgattgatctctttaattcaatgaaaagcaatggtattgcagccgactgccatgttttcaccatattaattgatacctatgctaaacgcggaatgatggatgatgcaatgcacatatttacggaaatgcagcaacaaggtgtgagtccaaatgttgtcacatattcaactgtaatatcagcactttctagaatgggtaggttgaccgatgctatggaaaaatttaatcagatggttgccttgggagtacagccggatagagctatttatcagtccctaattcagggcttttgtatgcatggtggtttggttaaagctaaggagttggtttctcaaatgataaacaaaggtattcctcatcctaacattgtgttcttcaattcagtaataaacagtatgtgcaaggaaggcagggttatggatgcacatgatatctttgacttggttatagacataggtgataggcctgatgacacttcatttaattcactgattgatggatattgcttagtcgggaagatggataaagcattcggaatgcttaatgccatggaatcagttggtgttgagcctgatattgttacttacagtacacttgttaatggctattgtagaaatggaaggatcgatgatggtttgactctgtttagagaaatgatgtgcaagggagttaaacctacaactgtgacatatggcatcatactggatgggttgtttcattctgggagaactgttgctgcaatgaaaatgttccatcagatgattgaaagtggaacaacagtgaccatttccacgtacagtataatacttggaggtctttgtagaaataattgtgcagacgaagcgattgtcctgttccagaaattaggagcaatgaatgtaaagttcagtattacaatactcaataccatgattaatgcaatgtacaaggttcaaagaaaagaagaagctaaggagttgttcggtacaatatcagccagtgggttggtgcctaatgaatgtacttatggagtaatgataaaaaatcttctggaagaaggatcagtggaagaagctgacaatatgttttcgtttatggacaggagtggtatagtccccagctcccgtctcatgaatgatatcatcagaatgttgttggaaaaaggtgagattgccaaggccggatattatctgtctaaagttgatggaaagagcatatcacttgaagcttcaactacttcattgatgttttctctcttttcaaggaaaagcaaatatcaggaggatatgaaattgctccctgcaaagtatcaaattttcgacggattagttgtc

SEQ ID NO: 1633 - DNA, 2619 bp, Triticum aestivum; identical to SEQ ID NO: 1632

SEQ ID NO: 1634 - DNA, 2496 bp, Triticum aestivum
atgtctcgcctccgtctccgcctcccccgcggcagctcctcccccaccacactgataccccgcctccggctcctccgccgctgctccacctccacctccacgtcgtcgccctcacgctcctggtctccccgagacgcctttgccgcggccacggagcgtgttcgcgccgggacgctcagcctggaagacgctcacaaactgttcgacgaattgctcggtcaggccaccccggtcccggagcgctccctgaacggcttccttgccgccctcgcccgcgcgcccgcctccggtgcctgcatcagagatggccccgcccttgcagtggctctcttcaaccgtgtgtgcagagaggaagccggcgcgcaggtggcggcgctcacagtttgcacctacaacatcctcatggactgctgctgccgtgcgcgtcgtccggacctagggcttgccttatttggctgcttcctcaggaagggcctgaagacagaccagaccggcgccaacaccttcctcaagtgcctctgctacgcgaaacggacggatgaggctgtgaacgtgctcctccacaggatgtccgagctcggctgtgtgcctaatgccgtttcgtacaacactgttctgaagggcttatgcgacaatagcatgagtcagcgggcgctcgacctgctccagatggtggcgggaaaaggaggtggctgcttccctgatgtggtggcgtatagcacggtcatccatggcttttttaaggagggtgaaacagggaaggcatgcagtctattccatgaaatgatgcagcaagggattgtgcccagtgtggtgacatataactcgattattgatgcgttgtgcaaggtcagagaagtggacaaggcagagctagtccttcgtcagatggttgctaaaggtgctcaacccgatacagtgacatataattgcatgatcaatggatatgccacatctgggcggttgaaagaggctgctaaaatgttcagagaaatgaaaagccggggtcttacaccaaatgttgttacttgcaactcgttcctggcctccctttgcaagcaccgaagtagcaaagaagctgcagaattttttgattccatgacagccaagggccaaaaacctgatatcatctcgtattgtactttgcttcatgggcatgccagagaaggatgctttactgatatgattgatctctttaattcaatgaaaagcaatggtattgcagccgactgccatgttttcaccatattaatcgatacctatgctaaacgcggaatgatggatgatgcaatgcacatatttacggaaatgcagcaacaaggtgtgagtccaaatgttgtcacatattcaactgtaatatcagcactttctagaatgggtaggttgaccgatgctatggaaaaatttaatcagatggttgccttgggagtacagccggatagagctatttatcagtccctaattcagggcttttgtatgcatggtggtttggttaaagctaaggagttggtttctcaaatgataaacaaaggtattcctcatcctaacattgtgttcttcaattcagtaataaacagtatgtgcaaggaaggcagggttatggatgcacatgatatctttgacttggttatagacataggtgataggcctgatgacacttcatttaattcactgattgatggatattgcttagtcgggaagatggataaagcattcggaatgcttaatgccatggaatcagttggtgttgagcttgatattgttacttacagtacacttgttaatggctattgtagaaatggaaggatcgatgatggtttgactctgtttagagaaatgatgtgcaagggagttaaacctacaactgtgacatatggcatcatactggatgggttgtttcattctgggagaactgttgctgcaatgaaaatgttccatcagatgattgaaagtggaacaacagtgaccatttccacgtacagtataatacttggaggtctttgtagaaataattgtgcagacgaagcgattgtcctgttccagaaattaggagcaatgattgtaaagttcagtattacaatactcaataccatgattaatgcaatgtacaaggttcaaagaaaagaagaagctaaggagttgttcggtacaatatcagccagtgggttggtgcctaatgaatgtacttatggagtaatgataaaaaatcttctggaagaaggatcagtggaagaagctgacaatatgttttcgtttatggacaggagtggtatagtccccagctcccgtctcatgaatgatatcatcagaatgttgttggaaaaaggtgagattgccaaggccggatattatctgtctaaagttgatggaaagagcatatcacttgaagcttcaactacttcattgatgttttctctcttttcaaggaaaagcaaatatcaggaggatatgaaattgctccctgcaaagtatcaaattttcgacggattagttgtc

SEQ ID NO: 1635 - DNA, 2619 bp, Triticum aestivum; identical to SEQ ID NO: 1632

SEQ ID NO: 1636 - DNA, 2085 bp, Triticum aestivum
atggactgctgctgccgcgcgtctcgcccggacctagggcttgccttctttggtcgcctcctcaggacgggcctcaagacaaatgagatcgtcgctagcaccttcctcaagtgcctctgctacgccaatcgtaaggaagaggctgtcaacgtgctgcttcataggatgcccgagcttggctgtgtgcctgatgccttctcatactccattgttctgaagagcttatgtgacaacaacacgagtcagcgggggctgctccagatgatggcgaaagaaggaggtggctgctctcccaacgtggtggcatatagcacggtcatccatggcttcttcaaggaaggtgaaacgggcaaggcatgcagtctgttccaccaaatgatgcagcaaggtgttgtgcccaatgtggtgacgtataactcgattattgatgcgttgtgtaaggctagagcaatggacaaggcagagctagtccttcggcagatggttgccaatggtgctcaacccaatgaagtgacatatacttgcatgatccatgggtattccacatctgggaggttgaaagaggctgctaaaatgttcagagaaatgaaaagccggggtcttacaccaaatactgttacctgcggctcgttaatgacttccctttgcaagcatggaagaagcaaagaagctagagaaatatttgattccatgactgccaaaggccacaaacctgatattgtctcgtaccgtattttgcttcatggttatgccagtgaaggatgctttgctgatatgattgatctatgtaattcaatggaaagcaacggtattgcagccgactgccgtgtttttaccatattaattgatgcctatgctaaacgtggaatgatggatgatgcaatgcacatatttacggaaatgcagcaacgaggtgtgagtccaaatgttgtcacatattcaactgtaatatcagcactttctagaatgggtaggctgaccgatgctatggaaaaatttaatcagatggttgccttgggagtacagccgaacatacctgtttattggtccctaattcagggcttttgtatgcatggtggtttggttaaagttaaggagttggtttctcaaatgataaacaaaggtattcctcgtcctaacattgtgttcttcaattcggtaataaacggtatgtgcaaggaaggaagggttatggatgcacatgatatctttgacttggttatagacctaggtgggaggcctgatgttattacatttaattcactgattgatggatattgcttggcccgcaagctggataaagcattcggaatgtttaattccatggaatcagttggtgttgagcctgatattgttacgtacagtacacttcttgatggctattttaaaaatagaaggatcaatgatggtttggctctgtttagagaaatgccgcgtaagagaattaaacctgacattgttacatatggcatcatgttggatgggttgtttcgtgctgggagaactgttgctgcaaggacaatgttccatgagatgatcgaaagtggaataacagtggacatccccacatataatatagttcttaggggactttgtagaaataactgcacagatgaagcaatcgccctgttccagaaattaggtgcaatgagtatgaagttcaatattgcaatactcaataccatgatcaatgcaatgtacaaggttcggagaagagaagaagctaacaatttgtttgctgcaatatcaaccagtgggttggtgcccaatcaatctacttatgcagtaatgataataaatcttctaaaagatggagcagtggaacatgctagcaatatgttttcatcaatggaaaaaagtggtatagtccccagctcccgtcttataaatggtatcatcagattgttgttggagaatggtgagattgccaaggctggaatttatttgtctaaagttgatgggaatagcatctcactcgaagcttcaactacttcattgatgttgtctctattttcaaggaaagggaaatatcatgaggacatgaaattgctcccagcaaagtatcaattttttgatggatgtagt

SEQ ID NO: 1637 - DNA, 2085 bp, Triticum aestivum; identical to SEQ ID NO: 1636

SEQ ID NO: 1638 - DNA, 2085 bp, Triticum aestivum
atggactgctgctgccgcgcgtctcgcccggacctagggcttgccttctttggtcgcctcctcaggacgggcctcaagacaaatgagatcgtcgctagcaccttcctcaagtgcctctgctacgccaatcgtaaggaagaggctgtcaacgtgctgcttcataggatgcccgagcttggctgtgtgcctgatgccttctcatactccattgttctgaagagcttatgtgacaacaacacgagtcagcgggggctgctccagatgatggcgaaagaaggaggtggctgctctcccaacgtggtggcatatagcacggtcatccatggcttcttcaaggaaggtgaaacgggcaaggcatgcagtctgttccaccaaatgatgcagcaaggtgttgtgcccaatgtggtgacgtataactcgattattgatgcgttgtgtaaggctagagcaatggacaaggcagagctagtccttgggcagatggttgccaatggtgctcaacccaatgaagtgacatatacttgcatgatccatgggtattccacatctgggaggttgaaagaggctgctaaaatgttcagagaaatgaaaagccggggtcttacaccaaatactgttacctgcggctcgttaatgacttccctttgcaagcatggaagaagcaaagaagctagagaaatatttgattccatgactgccaaaggccacaaacctgatattgtctcgtaccgtattttgcttcatggttatgccagtgaaggatgctttgctgatatgattgatctatgtaattcaatggaaagcaacggtattgcagccgactgccgtgtttttaccatattaattgatgcctatgctaaacgtggaatgatggatgatgcaatgcacatatttacggaaatgcagcaacgaggtgtgagtccaaatgttgtcacatattcaactgtaatatcagcactttctagaatgggtaggctgaccgatgctatggaaaaatttaatcagatggttgccttgggagtacagccgaacatacctgtttattggtccctaattcagggcttttgtatgcatggtggtttggttaaagctaaggagttggtttctcaaatgataaacaaaggtattcctcgtcctaacattgtgttcttcaattcggtaataaacggtatgtgcaaggaaggaagggttatggatgcacatgatatctttgacttggttatagacctaggtgggaggcctgatgttattacatttaattcactgattgatggatattgcttggcccgcaagctggataaagcattcggaatgtttaattccatggaatcagttggtgttgagcctgatattgttacgtacagtacacttcttgatggctattttaaaaatagaaggatcaatgatggtttggctctgtttagagaaatgccgcgtaagagaattaaacctgacattgttacatatggcatcatgttggatgggttgttttgtgctgggagaactgttgctgcaaggacaatgttccatgagatgatcgaaagtggaataacagtggacatccccacatataatatagttcttaggggactttgtagaaataactgcacagatgaagcaatcgccctgttccagaaattaggtgcaatgagtatgaagttcaatattgcaatactcaataccatgatcaatgcaatgtacaaggttcggagaagagaagaagctaacaatttgtttgctgcaatatcaaccagtgggttggtgcccaatcaatctacttatgcagtaatgataataaatcttctaaaagatggagcagtggaacatgctagcaatatgttttcatcaatggaaaaaagtggtatagtccccagctcccgtcttataaatggtatcatcagattgttgttggagaatggtgagattgccaaggctggaatttatttgtctaaagttgatgggaatagcatctcactcgaagcttcaactacttcattgatgttgtctctattttcaaggaaagggaaatatcatgaggacatgaaattgctcccagcaaagtatcaattttttgatggatgtagt

SEQ ID NO: 1639 - DNA, 2085 bp, Triticum aestivum; identical to SEQ ID NO: 1636

SEQ ID NO: 1640 - DNA, 2085 bp, Triticum aestivum
atggactgctgctgccgcgcgtctcgcccggacctagggcttgccttctttggtcgcctcctcaggacgggcctcaagacaaatgagatcgtcgctagcaccttcctcaagtgcctctgctacgccaatcgtaaggaagaggctgtcaacgtgctgcttcataggatgcccgagcttggctgtgtgcctgatgccttctcatactccattgttctgaagagcttatgtgacaacaacacgagtcagcgggggctgctccagatgatggcgaaagaaggaggtggctgctctcccaacgtggtggcatatagcacggtcatccatggcttcttcaaggaaggagaaacgggcaaggcatgcagtctgttccaccaaatgatgcagcaaggtgttgtgcccaatgtggtgacgtataactcgattattgatgcgttgtgtaaggctagagcaatggacaaggcagagctagtccttcggcagatggttgccaatggtgctcaacccaatgaagtgacatatacttgcatgatccatgggtattccacatctgggaggttgaaagaggctgctaaaatgttcagagaaatgaaaagccggggtcttacaccaaatactgttacctgcggctcgttaatgacttccctttgcaagcatggaagaagcaaagaagctagagaaatatttgattccatgactgccaaaggccacaaacctgatattgtctcgtaccgtattttgcttcatggttatgccagtgaaggatgctttgctgatatgattgatctatgtaattcaatggaaagcaacggtattgcagccgactgccgtgtttttaccatattaattgatgcctatgctaaacgtggaatgatggatgatgcaatgcacatatttacggaaatgcagcaacgaggtgtgagtccaaatgttgtcacatattcaactgtaatatcagcactttctagaatgggtaggctgaccgatgctatggaaaaatttaatcagatggttgccttgggagtacagccgaacatacctgtttattggtccctaattcagggcttttgtatgcatggtggtttggttaaagctaaggagttggtttctcaaatgataaacaaaggtattcctcgtcctaacattgtgttcttcaattcggtaataaacggtatgtgcaaggaaggaagggttatggatgcacatgatatctttgacttggttatagacctaggtgggaggcctgatgttattacatttaattcactgattgatggatattgcttggcccgcaagctggataaagcattcggaatgtttaattccatggaatcagttggtgttgagcctgatattgttacgtacagtacacttcttgatggctattttaaaaatagaaggatcaatgatggtttggctctgtttagagaaatgccgcgtaagagaattaaacctgacattgttacatatggcatcatgttggatgggttgtttcgtgctgggagaactgttgctgcaaggacaatgttccatgagatgatcgaaagtggaataacagtggacatccccacatataatatagttcttaggggactttgtagaaataactgcacagatgaagcaatcgccctgttccagaaattaggtgcaatgagtatgaagttcaatattgcaatactcaataccatgatcaatgcaatgtacaaggttcggagaagagaagaagctaacaatttgtttgctgcaatatcaaccagtgggttggtgcccaatcaatctacttatgcagtaatgataataaatcttctaaaagatggagcagtggaacatgctagcaatatgttttcatcaatggaaaaaagtggtatagtccccagctcccgtcttataaatggtatcatcagattgttgttggagaatggtgagattgccaaggctggaatttatttgtctaaagttgatgggaatagcatctcactcgaagcttcaactacttcattgatgttgtctctattttcaaggaaagggaaatatcatgaggacatgaaattgctcccagcaaagtatcaattttttgatggatgtagt

SEQ ID NO: 1641 - DNA, 2085 bp, Triticum aestivum; identical to SEQ ID NO: 1636

SEQ ID NO: 1642 - DNA, 2085 bp, Triticum aestivum
atggactgctgctgccgcgcgcgtcgcccagacctagggcttgccttattcggctgcatcctcaggacgggcttgaagatagaccaaatcaccgccaacaccctcctcaagtgcctctgctatgcaaaacagacagaagaggctgtgtacgtgctgcttcataggatgtcggagctcagctgtgtgcctgatgccttcgcatacaacatagttcttaagagcttatgtaaaggtagcaggagccagcgggcgcacgacctgctccggacgatggcaaaagatagaggtggctgcttccctgatgtggtgacatataccacggtcatccatggctttttcaaggagggcgaaacaggcaaggcatgcaatctattccatgaaatgatccatcaaggggttgagcccgatgtggcgacgtacaactcggttattgatgcgttgtgcaaggccagagcaatggacaaggctgaagtagtccttcagcagatggtcgataaaggtgttcaacctgatacagtgacatatacttgcatgatcaatggatattccacatctgggcggttgaaagaggctgctaaaatgttcagagaaatgaaaagccggggtcttataccagatattgttacttgcaactcgttcctggcctccatttgcaagcatggaacaagcaaagaagctgcagagtttttcgatgccatgactgccaagggccacaaaccgaatatcgtctcataccgtattttgcttcatgggtatgctactgaaggatgctttcctgatatgattgatgtctttaattcaatggaaagcaatggtattgcagccgactgccatgttttcaacatattaattgatgctaaacgtggaatgatggatgaagctatgctgatatcaagtaaaatgcaggaacgcagagtgaatcctgatgtagtcacctattccagcataatagctggactttccagattgggtaggctgactgaggccatggaaaaattcaatcagatgattgccttgggagtacaaccgaacaaagctgtttatcacgcgctgattcagggtttttgcatagatggtgatttggctaaagctaagcagttggtttatgaaatgatggacagaggtattcctcgtcctaacatttcgttctttagttcagtaataaagagtctctgccaagaaggaagggttatggatgcacatgatatctttgacttggttatagacatgggtgagaggcctgatggcattttatttaattcactgattgatggttactgcttagtcgggaagatggataaagcattaaaagtgcttgatgtcatggaatcagttggtgttgagcctgatgtttttacatacagtacacttgttaatggctattgtagaaatggaaggatcgatgatggtttgactctgttcagagagatgccgcgtaagagaattaaacctgacactgtttcatatcgcgtaataatggttgggttgtttcgtgctgggagaactgttgccgcaaggaaaatgttccatgagatgatcgagagtggaacaatggtggacattttcacatacaatataatactaggaggcctttgtagaaataattgtgcagacgaagcgatcgcactgttccagaaactacgagcaatgaatgtgaagtttgatattaccacactcaataccatgattaatgcaatgtacaacgttcaaagaaaagaagaagctaaggatttgtttgctacaatatcagccagtgggttggtgcctaatgaatctacttacagagtaatgataaaaaatcttctggaagaaggatcagtggaaaaagctgacagtatgttttcgttgatggacaagagtggtatagctcccagctctcgtctgttaaatgatattatcagaatgttgttggaaaaaggtgagatcaccaaggccggaaattatttgtctaaagttgatgggaagagcatctcacttgaagcttcaacgacttcattaatgttgtctctcttttcaagagaagggaaatatcgggaggacatgaaattgcttcctgcaaagtatcaatttttcgatggattttgt

SEQ ID NO: 1643 - DNA, 2085 bp, Triticum aestivum
atggactgctgctgccgcacgcgtcgcccagacctagggcttgccttattcggctgcatcctcaggacgggcttgaagatagaccaaatcaccgccaacaccctcctcaagtgcctctgctatgcaaaacagacagaagaggctgtgtacgtgctgcttcataggatgtcggagctcagctgtgtgcctgatgccttcgcatacaacatagttcttaagagcttatgtaaaggtagcaggagccagcgggcgcacgacctgctccggacgatggcaaaagatagaggtggctgcttccctgatgtggtgacatataccacggtcatccatggctttttcaaggagggcgaaacaggcaaggcatgcaatctattccatgaaatgatccatcaaggggttgagcccgatgtggcgacgtacaactcggttattgatgcgttgtgcaaggccagagcaatggacaaggctgaagtagtccttcagcagatggtcgataaaggtgttcaacctgatacagtgacatatacttgcatgatcaatggatattccacatctgggcggttgaaagaggctgctaaaatgttcagagaaatgaaaagccggggtcttataccagatattgttacttgcaactcgttcctggcctccatttgcaagcatggaacaagcaaagaagctgcagagtttttcgatgccatgactgccaagggccacaaaccgaatatcgtctcataccgtattttgcttcatgggtatgctactgaaggatgctttcctgatatgattgatgtctttaattcaatggaaagcaatggtattgcagccgactgccatgttttcaacatattaattgatgctaaacgtggaatgatggatgaagctatgctgatatcaagtaaaatgcaggaacgcagagtgaatcctgatgtagtcacctattccagcataatagctggactttccagattgggtaggctgactgaggccatggaaaaattcaatcagatgattgccttgggagtacaaccgaacaaagctgtttatcacgcgctgattcagggtttttgcatagatggtgatttggctaaagctaagcagttggtttatgaaatgatggacagaggtattcctcgtcctaacatttcgttctttagttcagtaataaagagtctctgccaagaaggaagggttatggatgcacatgatatctttgacttggttatagacatgggtgagaggcctgatggcattttatttaattcactgattgatggttactgcttagtcgggaagatggataaagcattaaaagtgcttgatgtcatggaatcagttggtgttgagcctgatgtttttacatacagtacacttgttaatggctattgtagaaatggaaggatcgatgatggtttgactctgttcagagagatgccgcgtaagagaattaaacctgacactgtttcatatcgcgtaataatggttgggttgtttcgtgctgggagaactgttgccgcaaggaaaatgttccatgagatgatcgagagtggaacaatggtggacattttcacatacaatataatactaggaggcctttgtagaaataattgtgcagacgaagcgatcgcactgttccagaaactacgagcaatgaatgtgaagtttgatattaccacactcaataccatgattaatgcaatgtacaacgttcaaagaaaagaagaagctaaggatttgtttgctacaatatcagccagtgggttggtgcctaatgaatctacttacagagtaatgataaaaaatcttctggaagaaggatcagtggaaaaagctgacagtatgttttcgttgatggacaagagtggtatagctcccagctctcgtctgttaaatgatattatcagaatgttgttggaaaaaggtgagatcaccaaggccggaaattatttgtctaaagttgatgggaagagcatctcacttgaagcttcaacgacttcattaatgttgtctctcttttcaagagaagggaaatatcgggaggacatgaaattgcttcctgcaaagtatcaatttttcgatggattttgt

SEQ ID NO: 1644 - DNA, 2085 bp, Triticum aestivum; identical to SEQ ID NO: 1642

SEQ ID NO: 1645 - DNA, 1758 bp, Triticum aestivum
atggctttttcaaggagggcgaaacaggcatgcaatctattccatgaaatgatccatcaaggggttgagcccgatgtggcgacgtacaactcggttattgatgcgttgtgcaaggccagagcaatggacaaggctgaagtagtccttcagcagatggtcgataaaggtgttcagcctgatacagtgacatatacttgcatgatcaatggatgttccacatctgggcggttgaaagaggctgctaaaatgttcagagaaatgaaaagccggggtcttataccagatattgttacttgcaactcgttcctggcctccatttgcaagcatggaacaagcaaagaagctgcagagtttttcgatgccatgactgccaagggccacgaaccgaatatcgtctcataccgtattttgcttcatgggtatgctactgaaggatgctttcctgatatgattgatgtctttaattcaatggaaagcaatggtattgcagccgactgccatgttttcaacatattaattgatgcatatgctaaacgtggaatgatggatgaagctatgctgatatcaagtaaaatgcaggaacgcagagtgaatcctgatgtagtcacctattccagcataatagctggactttccagattgggtaggctgactgaggccatggaaaaattcaatcagatgattgccttgggagtacaaccgaacaaagctgtttatcacgcgctgattcagggtttttgcatagatggtgatttggctaaagctaagcagttggtttctgaaatgatgaacagaggtattcctcgtcctaacatttcgttctttagttcagtaataaagagtctctgccaagaaggaagggttatggatgcacatgatatctttgacttggttatagacatgggtgagaggcctgatggcattttatttaattcactgattgacggttactgcttagtcgggaagatggataaagcattaaaagtgcttgatgtcatggaatcagttggtgttgagcctgatgtttttacatacagtacacttgttaatggctattgtagaaatggaaggatcgatgatggtttgactctgttcagagagatgccacgtaagagaattaaacctgacactgtttcatatcgcgtaataatggttgggttgtttcgtgctgggagaactgttgccgcaaggaaaatgttccatgagatgatcgagagtggaacaatggtggacattttcacatacaatataatactaggaggcctttgtagaaataattgtgcagacgaagcgatcgcactgttccagaaactacgagcaatgaatgtgaagtttgatattaccacactcaataccatgattaatgcaatgtacaacgttcaaagaaaagaagaagctaaggatttgtttgctacaatatcagccagtgggttggtgcctaatgaatctacttacagagtaatgataaaaaatcttctggaagaaggatcagtggaaaaagctgacagtatgttttcgttgatggacaagagtggtatagctcccagctctcgtctgttaaatgatattatcagaatgttgttggaaaaaggtgagatcgccaaggccggaaattatttgtctaaagttgatgggaagagcatctcacttgaagcttcaacgacttcattaatgttgtctctcttttcaagagaagggaaatatcgggaggacatgaaattgcttcctgcaaagtatcaatttttcgatggattttgt

SEQ ID NO: 1646 - DNA, 2085 bp, Triticum aestivum; identical to SEQ ID NO: 1643

SEQ ID NO: 1647 - DNA, 2085 bp, Triticum aestivum; identical to SEQ ID NO: 1642

SEQ ID NO: 1648 - DNA, 2085 bp, Triticum aestivum; identical to SEQ ID NO: 1643

SEQ ID NO: 1649 - DNA, 2376 bp, Triticum aestivum
atggtcttcccacgccgcatttgccgcggccacggagcgcgtccgcgccgggacgctcagaccggaggacgcacaccacctgttcgaccaattgctacaacagaccacccgggtccacgagcgctccctgcatggatattcctcgccgcccttgcccgtgctacgccctccgcagcctgcaaagatggcccctccctcgccctcgccctcttcaaccgcgtatgccgagaagaagcaggccggcgggtggcgccgcccacagtccatacatacggcatcctgatgaactgctgctgccttgtgcgtcgtccagacctagggcttgccttatttggccgcctcctaaggacagggctcaaaacaaatgagatcgtcgccagcaccatcctcaagtgcctctgctgcgcaaaacggacagatgaagcagtaaacgtgttgcttcataggatgtccgacctcggctgtgtgcctaatgtgttctcatacaacagagttctaaagagcttgtgtgaagatggcaggagccagcgggcgctcgacctgctccgggtgatggcaaaaggagatggagatggctgctccccctgcgtggtgtcatacagcacggtcatctatggcttctttaaggaaggcaaagtaggcaaggcatgcaatctatttcatgaaatgacgcagcaaggcattgtgtctgatgtggtgacgtataactcaattatcgatgcactgtgcaaggccagagctatggacaaggctgagctgttccttcggcagatggttgatgatgatattcgaccgaatggagtgacatatactgcaattatccatggatattccactttgggccagtggaaaaaggcgactcaaatgtttagagaaatgacaagccgcggtcttgtaccaaatactgtcacttggaactcattcatggcctccctctgcaagcatggaagaagcaaagaagttgcagaacttctttattccatggctgtgaagggccacaagcctaatgtcgtatcctactctattttgcttcatgggtatgcaaccgaagggtgctttgctgatatggttaatctctttaattcaatggtaggcaaaggtattgtaccggaccaccatgttttcaacatattcattaatgcatatgctaagtgtgggatgatggatgaagctatgcatatgttgactgaaatgcgggaacaaggaatgagtccggatatgtgcacctatgcaaccataatagctgcactttgcagaatgggtaggctggctgatgctgtggacaattttaatcagatgattgggaagggagtacagccaagcaaagttgtttatcgctccttaattcagggattctgtacacacggtgatttggtgaaagcgaaggagttcatttctgaaatgacggacaaatgtatttgtcgtcctaccattgtcttcttcagttcaataatgcatagtctgtgcaacgaaggaagggtcatagatgcgcaccatatctttgacttggttatagacattggtgagagacctgatctcattgcatttaatactctgattgacggatattgcttagtcggcaacatggagaaagcactcggtgtacttgattccatggtatcagctggcattgagcctactgttgttacatatagctcacttattagtgggtattgtaagagtggaaggctcgatgatggtgttattctattcagagaaatggagcataagagagttaaacctgacactgttacatataacatcatactggatgggttatttcatgctgggggaacaattgctgcaaagaagttgttcaatgagatggttgaaagtggaacagtagtgagcatttccacatacaggatagtccttggaggactttgtaggaataattgcaccaatgaagcaatcgtcttgttccagaaattaggtgcaatgaatgtgaagttcgatattgcaatactcaataccatgattaatgcaatgtacaaggttcagagaagagaagaagctaacgatttgtttgcttcattaccagcctgtgggctggtacctaatgcctctacttacggagtagtaatacagaatcttctgaaagaaggaccgttggaagaagctgacaatatgttttcatcaatggagaagagtggttgtgttcccagctctcgtcttataaatgatatcatcagaacgttattggaaaagggggaaatagtcaaggcagcaaattatatgtctaaaattgatgggaagatcatttcttttgaagcttcaaccacttcgttgatgttgtctctcttttcggagaaaggcaaataccaggaacaattacaattgctccctgcgaaataccatttctttggtggagtcatt

SEQ ID NO: 1650 - DNA, 2376 bp, Triticum aestivum; identical to SEQ ID NO: 1649

SEQ ID NO: 1651 - DNA, 2376 bp, Triticum aestivum; identical to SEQ ID NO: 1649

SEQ ID NO: 1652 - DNA, 2376 bp, Triticum aestivum; identical to SEQ ID NO: 1649

SEQ ID NO: 1653 - DNA, 2376 bp, Triticum aestivum; identical to SEQ ID NO: 1649

SEQ ID NO: 1654 - DNA, 2376 bp, Triticum aestivum; identical to SEQ ID NO: 1649

SEQ ID NO: 1655 - DNA, 2646 bp, Triticum aestivum
atgcccagccgcatcccgccgccgatgccccgccgcatatgcgtctggctccgctgctcctccccatcctcatcctgcacctatcccgactccggtctccgccacccgtcctgccttacctctccgttgtccggcctccgcctccgccgctccttcaccactccgatgtcgaacctccgcctccgctgctccttcaccactccgatgtcgaacctccgcctcttccgccgcagctcctcctccacctccacccccacctcgccgtcctcacgttcatggtctccccacgcagcctttgccgcggccacagagcgcgtccgcgccgggacgctgaaccaagacgacacacacaacctgtttgacgaattgctgcggcaggccatcccggtccccgggcgctccctgaacggcttcctcgccgccctcgcacgtgctacctcctctgccgcctgcatcagagatggccctgccctcaccgtcgccctcttcaaccgcgtgtgccgggagcaagccggcccgcgggtggcgcctctcacagtccacacgtacaacatcctcatggactgctgctgccgcgcgtctcgcccggacctaggtcttgccttcttcggccgcctcctcaggacgggcctcaagacaaatgagatcgttgccaccaccttcctcaagtgcctctgctacgcaaaacggacggatgaggctgtgaacgtgctgcttcataggatgcccgagctcggctgtgtgcctgacgccttcgcatactccactgttctgaagagcttatgcgacaatagcatgagtcagcgggggctcgacctgctccatatgatggcgaaagaaggaggtggctgctcccccaacgtggtggcgtatagcaccgtcatccatggcttctttaaggaaggtgaaacaggcaaggcatgcaatctgttccatgaaatgatgcagcaaggtgttgagcccaatgtgtggacatatagttcaatcattgatgcattgtgcaaggccagagcaatggacaaggcagagctagtgcttcagcagatggttaacaaaggtgttcaacccaataatgtgacatataattgcatgatccatggatattccacatctgggtggtggaaagaggttgttaaattgtttagagaaatgaaaagccggggccttataccagatatttttacttgcaactccttaatgacttacctttgtaagcatggaagaagcaaagaagctgcagaattttttgacgccgtgactgccaaaggccacagagatgtcatctcctactgtattttgcttcatgggtatgccaatgaaggatgctttgctgatatgattgatctctttaattcaatgcaaagaaacggtattgctgccaactgccatgttttcaacatattaattaatggatatgctaaacgtggaatgacggaagaagctatgctgatatttacaaaaatgtgggaaaaaggagtgagtccagatgtagtcacctattccatagtaatagccgcactttccagaatggggaggttgaccgacgctatggaaaaatttaatcagatgattgccatgggaattcagccaaacacagccgtttatcactccctaattcagggtttttgcatagacggtgatttggttaaagccaagcagctggtttctgaaatgatgaacagaggtattcctcgtccaaacattgtgttcttcaattcagtaataaacagtctgtgcaaagaaggaagggtcatggatgcacatgatgtcttagacttggttgtaggcataggtgagaggcctaatgtcattacatttagttcactgattgacggatattgctcagtcgggaacatggataaagcattcaaaatacttgatgtcatggaatcagttggtgttgagcctaatgttgttacttatagtgcacttcttgatggctattctaaaaacagaaggattgatgatgctctgactttgtttagagaaatgccgcgtaagagaattaaacctgacactgttacatgtggcatcatgttggatgggttgtttcgtgctgggagaactgtcgctgcaatggaaatgttccatgagatgactgaaagtggaacaacagtggacattttcatatacaatataatacttggaggtctttgtagaaataattgtgtagatgaagcgattgcactgttccagaaattgcgagcaatgaatgtgaagttcaatattgaaatactcaataccatgattaatgcaatgtacaaggttcaaagaaaggaagaagcaaaggaattgtttgctacaatatcagccaatgggttggtgcccaatgaatctacttatgcagtaatgataagaaatcttctgaaagacggagcagtggaagatgctgacaatatgttttcatcaatggacaacagtggtatcgttcccagttcccgtcttataaatgatatcatcagaatgttgttggaaaaaggtgagatagccaaggctggaaattatttgtctaaagttgatgggaagagtatctcacttgaagcttcaactacctcattgatgttgtctctcttttcaaggaaagggaaacaccaggaggatattaagttgctccctgcaaagtatcaaatttttgatggatttagt

SEQ ID NO: 1656 - DNA, 1632 bp, Triticum aestivum
atggacaaggcagagctagtgcttcagcagatggttaacaaaggtgttcaaccgaataatgtgacatataattgcatgatccatggatattccacatctgggtggtggaaagaggttgttaaattgtttagagaaatgaaaagccggggccttataccagatatttttacttgcagctccttaatgacttacctttgtaagcatggaagaagcaaagaagctgcagaattttttgacgccgtgactgccaaaggccacagagatgtcatctcctactgtattttgcttcatgggtatgccaatgaaggatgctttgctgatatgattgatctctttaattcaatgcaaagaaacggtattgctgccaactgccatgttttcaacatattaattaatggatatgctaaacgtggaatgacggaagaagctatgctgatatttacagaaatgtgggaaaaaggagtgagtccagatgtagtcacctattccatagtaatagccgcactttccagaatggggaggttgaccgacgctatggaaaaatttaatcagatgattgccatgggaattcagccaaacacagccgtttatcactccctaattcagggtttttgcatagacggtgatttggttaaagccaagcagctggtttctgaaatgatgaacagaggtattcctcgtccaaacattgtgttcttcaattcagtaataaacagtctgtgcaaagaaggaagggttatggatgcacatgatgtcttagacttggttataggcataggtgagaggcctaatgtcattacatttaattcactgattgacggatattgcttagtcgggaacatggataaagcattcaaaatacttgatgtcatggaatcagttggtgttgagcctaatgttgttacttatagtgcacttcttgatggctattctaaaaacagaaggattgatgatgctctgactttgtttagagaaatgccgcgtaagagaattaaacctgacactgttacatatggcatcatgttggatgggttgtttcgtgccgggagaactgtcgctgcaatggaaatgttccatgagatgactgaaagtggaacaacagtggacattctcatatacaatataatacttggaggtctttgtagaaataattgtgtagatgaagcgattgcactgttccagaaattgcgagcaatgaatgtgaagttcaatattgaaatactcaataccatgattaatgcaatgtacaaggttcaaagaaaggaagaagcaaaggaattgtttgctacaatatcagccaatgggttggtgcccaatgaatctacttatgcagtaatgataagaaatcttctaaaaggcggagcagtggaagatgctgacaatatgttttcatcaatggacaacagtggcatcgttcgcagttctggtcttataaatgatatcatcagaatgttgttgaaaaaaggtgagatagccaaggctggcaattatttgtctaaagttgacgggaagagtatctcacttgaagcttcaactacctcattgttgttgtctctcttttcaaggaaagggaaacatcaggtggatattaagttgctccctgcaaagtatcaattttttgatggatttggt

SEQ ID NO: 1657 - DNA, 1632 bp, Triticum aestivum; identical to SEQ ID NO: 1656

SEQ ID NO: 1658 - DNA, 1632 bp, Triticum aestivum; identical to SEQ ID NO: 1656

SEQ ID NO: 1659 - DNA, 657 bp, Triticum aestivum
atgccgcgtaagagaattaaacctgacactgttacatatggcatcatgttggatgggttgtttcgtgctgggagaattgtcgctgcaatggaaatgttccatgagatgactgaaagtggaacaacagtggatattctcatatacaatataatacttggaggtctttgtagaaataattgtgtagatgaagcgattgcactgttccagaaattgcgagcaatgaatgtgaagttcaatattgaaatactcaataccatgattaatgcaatgtacaaggttcaaagaaaggaagaagcaaaggaattgtttgctacaatatcagccaatgggttggtgcccaatgaatctacttatgcagtaatgataagaaatcttctgaaagacggagcagtggaagatgctgacaatatattttcatcaatggacaacagtggtatcgttcccagttcccgtcttataaatgatatcatcagaatgttgttggaaaaaggtgagatagccaaggctggaaattatttgtctaaagttgatgggaagagtatctcacttgaagcttcaactacctcattgatgttgtctctcttttcaaggaaagggaaacatcaggaggatattaagttgctccctgcaaagtatcaattttttgatgggtttggt

SEQ ID NO: 1660 - DNA, 2367 bp, Triticum aestivum
atggtctccccgcgacgcctttgccgcggccacggagcgcgtccgtgccgggacgctcagcccggaggacgcacaccacctgttcaaccaattgctacggcaggacactccggtccacgagcgctccctgggcggcttccttgccgccctcgcccgtgcgccagactcagctgcctgcagagatggccccgccctcgccatcgccctcttcaaccgcgtatgccgagaagaagcaggccggccggtggtgccgcccacagtctacacctacgccatcctgatgaactgctgctgccgcgtgcgtcgtccggacctagggcttgccttatttggccgcctcctaaggacaggcctcaaacaaatgagatcgtcgccagcaccgtcctcaagtgcctctgctgcgcaaaacggacagatgaagcagtaaacgtgctgattcataggatgtccgacctcggctgtgtgccaaatgagttctcatacaaaacagttctgaagagcctgtgtgaagatagcaggagccagcgagcgctcgatctgctccgggtgatggcaaaaggagatggctgctccccctgcgtggtgtcatacagcactgtcatctatggcttctttaaggaaggaaaagtaggcaaggcatgcaatctatttcatgaaatgacgcagcaaggcgttgtgtctgatgtggtgacatataactcaattatcgatgcactgtgcaaggccagagctatggacaaggctgagctattccttcggcagatggttgatgatgatattcgaccgaatggagtgacatataatgcaatgatccatggatattccactttgggccagtggaaaaaggcgactcaaatgtttagagaaatgacaagccgcggtcttgtaccagatactgtcacttggaactcatgcatggcctccctctgcaagcatggaagaagcagagaagctgcagaacttctttattccatggctgcgaagggccacaagcctaatgtcgtatcctactctactttgcttcatgggtatgcaaacgaagggtgctttgctgatatggttaatctctttaattcaatggtaggcaaaggtattgtaccggaccaccatgttttcaacatattcattaatgcatatgctaagtgtgggatgatggatgaagttatgcatatgttgactgaaatgcgggaacaaggaatgagtccggatgtgtgcacctatgcaaccataatagctgcactttgcagaatgggtaggctggctgatgctgtggacaattttaatcagatgattgggaagggagtacagccaagcaaagttgtttatcgctccttaattcagggattctgtacacacggtgatttggtgaaagcgaaggagttcatttttgaaatgacggacaaatgtatttgtcgtcctaccattgtcttcttcaattcaataatgcatagtctgcgcaacgaaggaagggtcatagatgcgcaccatatctttgacttggttatagacattggtgagagacctgatctcattgcatttaatactctgattgatggatattgcttagtcggcaacatggagaaagcactcggtgtacttgattccatggtatcagctggcattgagcctactgttgttacatatagctcacttattagtgggtattgtaagagtggaaggctcgatgatggtgttattctattcagagaaatggagcataagagagttaaacctgacactgttgcatataacatcatactggatgggttatttcatgctggggcaacaattgctgcaaagaagttgttcaatgagatgattgaaagtggaacagcagtgagcatttccacatacaggatagttcttggaggattttgtaggaataattgcaccgatgaagcgatcgtcttgttccagaaattaggtgcaatgaatgtgaagttcgatattgcaatactcaataccatgattaatgcaatgtacaaggttcagagaagagaagaagctaacgatttgtttgcttcattaccagcctgtgggctcgtacctaatgcctctacttacggagtagtaatacagaatcttctgaaagaaggatcgttggaagaagctgacaatatgttttcatcaatggagaagagtggttgtgctcccagctctcgtcttataaattatatcatcagaacgttgttggaaaagggggagatagtcaatgcagcaaattatatgtctaaagttgatgggaagatcatctcttttgaagcttcgaccacttcgttgttgttgtctctcttttcggagaaaggcaaatatcaggaacaattacaattgctccctgcgaaataccaattctttggtggagtcatt

SEQ ID NO: 1661 - DNA, 2148 bp, Triticum aestivum
atgccgagaagaagcaggcaggccggtggtgccgcccacagtctacacctacgccatcctgatgaactgctgctgccgcgtgcgtcgtccggacctagggcttgccttatttggccgcctcctaaggacaggcctcaaacaaatgagatcgtcgccagcaccgtcctcaagtgcctctgctgcgcaaaacggacagatgaagcagtaaacgtgctgattcataggatgtccgacctcggctgtgtgccaaatgagttctcatacaaaacagttctgaagagcctgtgtgaagatagcaggagccagcgagcgctcgatctgctccgggtgatggcaaaaggagatggctgctccccctgcgtggtgtcatacagcactgtcatctatggcttctttaaggaaggaaaagtaggcaaggcatgcaatctatttcatgaaatgacgcagcaaggcgttgtgtctgatgtggtgacatataactcaattatcgatgcactgtgcaaggccagagctatggacaaggctgagctattccttcggcagatggttgatgatgatattcgaccgaatggagtgacatataatgcaatgatccatggatattccactttgggccagtggaaaaaggcgactcaaatgtttagagaaatgacaagccgcggtcttgtaccagatactgtcacttggaactcatgcatggcctccctctgcaagcatggaagaagcagagaagctgcagaacttctttattccatggctgcgaagggccacaagcctaatgtcgtatcctactctactttgcttcatgggtatgcaaacgaagggtgctttgctgatatggttaatctctttaattcaatggtaggcaaaggtattgtaccggaccaccatgttttcaacatattcattaatgcatatgctaagtgtgggatgatggatgaagttatgcatatgttgactgaaatgcgggaacaaggaatgagtccggatgtgtgcacctatgcaaccataatagctgcactttgcagaatgggtaggctggctgatgctgtggacaattttaatcagatgattgggaagggagtacagccaagcaaagttgtttatcgctccttaattcagggattctgtacacacggtgatttggtgaaagcgaaggagttcatttttgaaatgacggacaaatgtatttgtcgtcctaccattgtcttcttcaattcaataatgcatagtctgtgcaacgaaggaagggtcatagatgcgcaccatatctttgacttggttatagacattggtgagagacctgatctcattgcatttaatactctgattgatggatattgcttagtcggcaacatggagaaagcactcggtgtacttgattccatggtatcagctggcattgagcctactgttgttacatatagctcacttattagtgggtattgtaagagtggaaggctcgatgatggtgttattctattcagagaaatggagcataagagagttaaacctgacactgttgcatataacatcatactggatgggttatttcatgctggggcaacaattgctgcaaagaagttgttcaatgagatgattgaaagtggaacagcagtgagcatttccacatacaggatagttcttggaggattttgtaggaataattgcaccgatgaagcgatcgtcttgttccagaaattaggtgcaatgaatgtgaagttcgatattgcaatactcaataccatgattaatgcaatgtacaaggttcagagaagagaagaagctaacgatttgtttgcttcattaccagcctgtgggctcgtacctaatgcctctacttacggagtagtaatacagaatcttctgaaagaaggatcgttggaagaagctgacaatatgttttcatcaatggagaagagtggttgtgctcccagctctcgtcttataaattatatcatcagaacgttgttggaaaagggggagatagtcaatgcagcaaattatatgtctaaagttgatgggaagatcatctcttttgaagcttcgaccacttcgttgttgttgtctctcttttcggagaaaggcaaatatcaggaacaattacaattgctccctgcgaaataccaattctttggtggagtcatt

SEQ ID NO: 1662 - DNA, 2367 bp, Triticum aestivum; identical to SEQ ID NO: 1660

SEQ ID NO: 1663 - DNA, 2367 bp, Triticum aestivum
atggtctccccgcgacgcctttgccgcggccacggagcgcgtccgtgccgggacgctcagcccggaggacgcacaccacctgttcgaccaattgctacggcaggacactccggtccacgagcgctccctgggcggcttccttgccgccctcgcccgtgcgccagactcagctgcctgcagagatggccccgccctcgccatcgccctcttcaaccgcgtatgccgagaagaagcaggccggccggtggtgccgcccacagtctacacctacgccatcctgatgaactgctgctgccgcgtgcgtcgtccggacctagggcttgccttatttggccgcctcctaaggacaggcctcaaacaaatgagatcgtcgccagcaccgtcctcaagtgcctctgctgcgcaaaacggacagatgaagcagtaaacgtgctgattcataggatgtccgacctcggctgtgtgccaaatgagttctcatacaaaacagttctgaagagcctgtgtgaagatagcaggagccagcgagcgctcgatctgctccgggtgatggcaaaaggagatggctgctccccctgcgtggtgtcatacagcactgtcatctatggcttctttaaggaaggaaaagtaggcaaggcatgcaatctatttcatgaaatgacgcagcaaggcgttgtgtctgatgtggtgacatataactcaattatcgatgcactgtgcaaggccagagctatggacaaggctgagctattccttcggcagatggttgatgatgatattcgaccgaatggagtgacatataatgcaatgatccatggatattccactttgggccagtggaaaaaggcgactcaaatgtttagagaaatgacaagccgcggtcttgtaccagatactgtcacttggaactcatgcatggcctccctctgcaagcatggaagaagcagagaagctgcagaacttctttattccatggctgcgaagggccacaagcctaatgtcgtatcctactctactttgcttcatgggtatgcaaacgaagggtgctttgctgatatggttaatctctttaattcaatggtaggcaaaggtattgtaccggaccaccatgttttcaacatattcattaatgcatatgctaagtgtgggatgatggatgaagttatgcatatgttgactgaaatgcgggaacaaggaatgagtccggatgtgtgcacctatgcaaccataatagctgcactttgcagaatgggtaggctggctgatgctgtggacaattttaatcagatgattgggaagggagtacagccaagcaaagttgtttatcgctccttaattcagggattctgtacacacggtgatttggtgaaagcgaaggagttcatttttgaaatgacggacaaatgtatttgtcgtcctaccattgtcttcttcaattcaataatgcatagtctgcgcaacgaaggaagggtcatagatgcgcaccatatctttgacttggttatagacattggtgagagacctgatctcattgcatttaatactctgattgatggatattgcttagtcggcaacatggagaaagcactcggtgtacttgattccatggtatcagctggcattgagcctactgttgttacatatagctcacttattagtgggtattgtaagagtggaaggctcgatgatggtgttattctattcagagaaatggagcataagagagttaaacctgacactgttgcatataacatcatactggatgggttatttcatgctggggcaacaattgctgcaaagaagttgttcaatgagatgattgaaagtggaacagcagtgagcatttccacatacaggatagttcttggaggattttgtaggaataattgcaccgatgaagcgatcgtcttgttccagaaattaggtgcaatgaatgtgaagttcgatattgcaatactcaataccatgattaatgcaatgtacaaggttcagagaagagaagaagctaacgatttgtttgcttcattaccagcctgtgggctcgtacctaatgcctctacttacggagtagtaatacagaatcttctgaaagaaggatcgttggaagaagctgacaatatgttttcatcaatggagaagagtggttgtgctcccagctctcgtcttataaattatatcatcagaacgttgttggaaaagggggagatagtcaatgcagcaaattatatgtctaaagttgatgggaagatcatctcttttgaagcttcgaccacttcgttgttgttgtctctcttttcggagaaaggcaaatatcaggaacaattacaattgctccctgcgaaataccaattctttggtggagtcatt

SEQ ID NO: 1664 - DNA, 1170 bp, Triticum aestivum
atgagtccggatgtgtgcacctatgcaaccataatagctgcactttgcagaatgggtaggctggctgatgctgtggacaattttaatcagatgattaggaagggagtacagccaagcaaagttgtttatcgctccttaattcagggattctgtacacacggtgatttggtgaaagcgaaggagttcatttttgaaatgacggacaaatgtatttgtcgtcctaccattgtcttcttcaattcaataatgcatagtctgtgcaacgaaggaagggtcatagatgcgcaccatatctttgacttggttatagacattggtgagagacctgatctcattgcatttaatactctgattgatggatattgcttagtcggcaacatggagaaagcactcggtgtacttgattccatggtatcagctggcattgagcctactgttgttacatatagctcacttattagtgggtattgtaagagtggaaggctcgatgatggtgttattctattcagagaaatggagcataagagagttaaacctgacactgttgcatataacatcatactggatgggttatttcatgctggggcaacaattgctgcaaagaagttgttcaatgagatgattgaaagtggaacagcagtgagcatttccacatacaggatagttcttggaggattttgtaggaataattgcaccgatgaagcgatcgtcttgttccagaaattaggtgcaatgaatgtgaagttcgatattacaatactcaataccatgattaatgcaatgtgcaaggttcagagaagagaagaagctaacgatttgtttgcttcattaccagcctgtgggctcgtacctaatgcctctacttacggagtagtaatacagaatcttctgaaagaaggatcgttggaagaagctgacaatatgttttcatcaatggagaagagtggttgtgctcccagctctcgtcttataaattatatcatcagaacgttgttggaaaagggggagatagtcaatgcagcaaattatatgtctaaagttgatgggaagatcatctcttttgaagcttcgaccacttcgttgttgttgtctctcttttcggagaaaggcaaatatcaggaacaattacaattgctccctgcgaaataccaattctttggtggagtcatt

SEQ ID NO: 1665 - DNA, 2148 bp, Triticum aestivum; identical to SEQ ID NO: 1661

SEQ ID NO: 1666 - DNA, 2367 bp, Triticum aestivum; identical to SEQ ID NO: 1660

SEQ ID NO: 1667 - DNA, 2274 bp, Triticum aestivum
atgccaaccgcccgcctgtcctccatcttcacctcctccttcaaggctccttcacgagagcgccgagctcccctcgccgccttggctgctgccacggagcgtgtgcgcgccggaacgctaagccaggaggacgcgcaccacctgttcgacgaattgctgagccaagccgccaccgtcccagtacgcgggctcaacaactttcttgctgcgctagctcgtgcaccgcccggactgctgtaccgaggcgctggtgcacgggtggtgtcgcccacgtgctgtacctattccatcctcatggactgctgctgccgtgcaggccgcccggacttggtgcttgccttcttcggccgcctcctcaggttggggctgcgctttgaggaggtcatccccttcaacaacctcctcaaggggctctgccaggccaagcgttcaaatgaggctttggacatgctgctccaccggatgcccgaactggactgtgcgcctgatgtcttctcgttcaacatagtaatcaacggctgctttaaagaaggtgaagtagacaaagcgtgcaatctcttccatgagatgccccaactgggagttcaacctgatgtggtcacctacacctcaatcatggacgcactaagcaagtccggagcaatggacaaggcagaagtgctccttcggcaaatggttgatcaaggaattgaacccaatatcattacgtatactagtctgatccatggatattccacttcgggtcagtggaaagcagcagttaggatattcaaagaaatggcaagtgctggtgttcgaccaaattctgtcacgttgaactcatttattgattccctttgcaagcatagaaagacaaaggaagctagagatatttttgactccatggccgcaaagggccacaaacctgatattttctcctactctactatgcttaattggtatgcgaaagaaggatgcttcgatgatatgactgatctcttcaattcgatggtacggaatggtatcgtacctgaccaccatgttttcaacatactgatcaatgcatatgctagacgtggactgatggataaggctatgcacatgttcgaagtaatgaggcaacaaggagtaaacccaaatgtagttgactatgtagtagtaatggattcactttgcaaaatgggcaagatggctgctgctatggatatatttaatcagatggtcaatcaaggagtttcacctaacaaagctgtttaccaatgcctggttctgggttcttgctctcatggtcattttgtgaaagccaaggaattgatttctgaagcggttaatagaggtctgtgttctaacagtgtgttcttctatcctgtaataaacgaccgttgcaaagaaggaaaggtgaaggaggcacaggatatgtttgacttcattgtaggtattggtcatcggcctcatgtgattatgtacaattcactgatggatggatattgccttgttggcaaggtggaggaagcactgagagtacttgatgctatgaagtctgctggcctccaacctgatctttttacatatggtatacttattaatggctactgtaaaattggaaggatcgacgagggattgagtcttgtcagggaaatttcactcagtggggttaagcccacgactattatgtacaacattatacttgatgggctgttttgctctgggagaacagttcctgcaaaggaaaaattccataagatgaatgaaagtggcataccagtgggcgttggaacatacaacatagttcttagtggactttgtaaaaataattgcactgatgaagcaatagagctgttcaagaaattacgtgctgtgaacgtgaagattaatgtcataacactcactaccatgatttctgcaatgtttaaaactaggagaattgaagaagccaaggatttgtttgctgctatatcagccattgggttggtgccttctgttgtgacttacagtataacgatgacaaatttcataaaagaagggttgcttgcagatgctgatgatatgttttcagcaatggagaaggctggctgtgctcacaactccagactgctaaatcaagtggtcagggtatttctgaagaatggtgaagttgtaaaggctgtgacttatcttgccaaacttgatgcaaaacagctgtcagttgaagcttcgacggtttcgttaatagtatctctcttctcaaggaaagggaaattaagggagcatgtaaaattgcttccggtaaagtaccagcctcctgagatgttggac

SEQ ID NO: 1668 - DNA, 2304 bp, Triticum aestivum
atgccaaccgcccgcctgtcctccatctccacctcctccttcagggctccttcacgagcccccctcgccgccttggctgccgccacggaacgcgttcgtgctggaacactaagccgggaggacgcgcaccacctgttcgacgaattgctaggccaagccgcccccgtcccggaacgagggctgaacaactttcttgccgcactagcccgtgctccgccctcatctgcctacagcgatggccccggccttgccatcgccctcttcaaccgcatgtcccgatgcgctggtgcacgggtggtgtcgcccacgctctgtacctattccatcctcatggactgctgctgccgcgcaggctgccgggagctggtggttgccttctttggccgcctcatcaagttggggctgcgcttgaatgtcatccccttcaacaacctcctcaaggggctctgccaggccaagcgtacaaatgaggcggtggacttgctgctccaccggacacctgaactggactgtgtgcctaatgtcttctcgtacagcatcgtaatcaacggctgttttaaacaaggtgaagtagacaaagcgtgcaatctcttccatcagatgatccaactgggagttcaacctaatttggtgacctacaactcaatcatcgacgcactaagcaaatccggagcaatggacaaggcagaagtagtccttcggcaaatggttgatcaaggcattggaccaaacgtcatgacatatactagtctgatccatggatattccacttcaggtcagtggaaggaggcagttaggttattcaagaaaatgataggtcttggtgctctaccagataccgtcatgtggaactcatttatggattcactttgcaagcatagaaggacaaaggatgctagagatatttttgactccatggctgcaaagggccaaaaacctgatattttctcctactctattatgctaaatgggtatgctaaagaaggatacttcgaggatatgactgatctcttcaatttgatggtacggaatggtattgtacctaaccaccatgttttcaacatactgatcaatgcatatgctaaacgtggactgatggatgaggctatgcacatgttcgaagtaatgaggcaacaaggagtaaacccaaatgtagactatctagtaataatggattcactttgtaaaatgggtaggatggatgctgctctggacaaatttaatcagatggtcaatcaaggagtttcacctaacaaagctgtttaccaatgcctggttctgggttcttgctctcatggtcattttgtgaaagccaaggaattgatctctgaagcaattaatagaggtctgttttctaacagtgtgttcttctatcctgtaataaacgacctgtgcaaagaaggaaaggtgaaggaggcacaggatatgtttaacttcattgtaggtattggtcagcggcctgatgtgattatgtacaattcactgatggatggatattgccttgttggcaaggtggaggaagcactgagagtacttgctgctatgaagtctgctggcctccaacctactgctgttacatacggtatacttcttaatggctactgtaaaagtggaaggattgctgctgggttgagtcttttcatggaaatgtcactcagcggggttaagcccactactattatgtacaacattatacttgatgggctgttttgctctgggagaacagtttctgcaaaggaagaattcgatacgatgattgaaagtggcataccagtgaacgttcgcacatacaacatagttcttagtggactttgtagaaacaattgcactggtgaagcaatagagctgttcaagaaattacgtgctatgaacgtgaagattaatgtcataacactcaataccatgatttctgctatgtttaaaactaggagaattgaagaagccaaggatttgtttgctactatatcagccatcggattggtgccttctgttgtgacttacagtgtaatgatgacgaatttcataaaagaagggttgctggcagaggctgatgatatgtttttagcaatggagaaggctggctgtgctcctgactccagactgctaaatcacgtggtcagagtgttgctggagaatggtgcagttgtaaaggctgtgacttatctcactaaacttgatgctaaacagctgtcacttgaagcttcaacggtttcgttcattgtatctctcttctcaaggaaagggaaattaagggagcatgtaaaattgcttccggtaaagtaccagcctcctgagatgttgggc

SEQ ID NO: 1669 - DNA, 2493 bp, Triticum aestivum
atgtccagcatccacctccgtcactgctccactatgcccatgtcccgcgtctgcctccgccgccgcctctcctcctcctcctccttctccaactgcacctcgccgccctccccaacctggtctccccacgccgcctttgccgcggccacagagcgcgtgcgagccggtacgctcagcccgcaagacgcacaccacctgttcgacgtattgtttcagcaggccattcgggtccccgagcgctcccttgatggattccttgccgccctcagccatgctacgtcctctgaagcctgcagagacggccccgccctcgccctcaccctcttcaaccgtgtctgccgagaagaagccggcatgcgggtggcgctgcccaccatcttcacctacggcatcctcatgaactgctgctgccgcgtacgtcgtccggacctagggcttgccttctttgggtgcatcctcagggcgggcctgaagacaaaccagatcgccgccaacaccgtcatcaagtgcctctgctgcgcaaaacatactgacgaggctgtcaatatgctgcttcataggatgtccgacctcggctgtgtgcctgatgccttctcatacaacaccattctgaagagcttgtgtgaagacggcaggagcttgcaggcgctcgacctactgctccagatggtgtcgaaggaaggaggtgcctgctctcccgacatggtggcatatagcacggtcatccacggcttcttgaaggaaggcaaagtagacaaggcatgcaatctattcaatgaaatgatgcggcaaggggttgtgcctgatgtggtgacgtatagctcgattatcgatgcattgtgcaaagccggagcaatgcacaaagcagagttgttccttcggcagatggttgataacggtgttcgaccggatgaggtgacatatactagcatgatccatggatattccactttgggccggctgaaagaggtgcgtaaaatgttcagagaaatgacaagctgtggtcttataccagatattgtcacttggaactcgttcatggactccctttgcaagcatggaagaaccaaagaagctgcaaaggttttcttctccatggctgcaaagggcaacaagcctaatattgtctcctacactattcttcttcatgggtatgccaatgaaggaagctttgctgatatgatgagtctcttcaattcaatgaaaggcggcggcattgtagccaactgcaaagttttcaacatattaattggtgcatatgctaaacgagggctgatagatgaagctatgctcatacttactgaaatgcggggacaaggactgagtccggatgtagtcacctattcaactctaatatctgcacattggagaatgggtaagctgactgatgcaatggataacttcagtcagatggttgttggtacgggagtacagccggacacagttttttatcactccctagttcagttcttatgtacacatggtgatttggtgaaagcgaaggagttgatttctgaaatgatgaataaaggtattgctcgtccaaacactgcactcttcagttcaataatggacagtctatgcaatgaaggaagggttatagatgcacaccatatctttgacttggttatagacataggtgagaaacctgatatcagtatgtttagtacgctgattgacggatattgcttagtcggcgagatggacaaagcatgtggagtacttgatgccatggtatcagctggcattgagcctaatgtcattacgtatagcacacttgtcagtagatattgtaaacgtggaaggatcgatgatgggttaattctgttcagacaaatgttgcataagaaagttaaacctacaactgttacatatgaaaccatactgaatggattatttcgtgctgggagaactgctgatgcaaagaaaatgttccatgagatgatcgaaagtggaataatggtgagcatttctgcatataatataattcttggaggactttgtagaaataattgcgcagatgaagcgatcgtcctattccagaaattacgtgcaatgaatgtgaagttcaatatcacaacactcaataccatcattaatgcattgtacaaggttgaaagaagagaagaagctaatgatttgtttgctgcattaccagccagcgggttggtgcctaatgcttccacttatggagttatggtacaaaatcttctaaaagaaggagcagtggaggaagctgacagtatgttttcatcaatggagaagagtggttgtgctcctagctctcgtcttataaatgatgtcatcagaactttattggaaaagggggagatagtcaaggccggaaaatatatgtctaaagttgatgggaagagcatctcacttcaagcttcaactagttcattgttgttgtctctcttttcagggaatgggaaatatcgggaacaactacaattgctccctgcaaagtaccaatttttcaatggaatcagt

SEQ ID NO: 1670 - DNA, 2493 bp, Triticum aestivum; identical to SEQ ID NO: 1669

SEQ ID NO: 1671 - DNA, 2493 bp, Triticum aestivum; identical to SEQ ID NO: 1669

SEQ ID NO: 1672 - DNA, 1713 bp, Triticum aestivum
atgatgcggcaaggggttgtgcctgatgtggtgacgtatagctcgattatcgatgcattgtgcaaagccggagcaatgcacaaagcagagttgttccttcggcagatggttgataacggtgttcggccggatgaggtgacatatactagcatgatccatggatattccactttgggccggctgaaagaggtgcgtaaaatgttcagagaaatgacaagctgtggtcttataccagatgttgtcacttggaactcgttcatggactccctttgcaagcatggaagaaccaaagaagctgcaaaggttttcttttccatggctgcaaagggcaacaagcctaatattgtctcctacactattcttcttcatgggtatgccaatgaaggaagctttgctgatatgatgagtctcttcaattcaatgaaaggcggcggcattgtagccaactgcaaagttttcaacatattaattggtgcatatgctaaacgagggctgatagatgaagctatgctcatacttactgaaatgcggggacaaggactgagtccggatgtagtcacctattcaactctaatatctgcacattggagaatgggtaagctgactgatgcaatggataagttcagtcagatggttgttggtatgggagtacagccggacacagttttttatcactccctagttcagttcttatgtacacatggtgatttggtgaaagcgaaggagttgatttctgaaatgatgaataaaggtattgctcgtccaaacactgcactcttcagttcaataatggacagtctatgcaatgaaggaagggttatagatgcacaccatatctttgacttggttatagacataggtgagaaacctgatatcagtatgtttagtacgctgattgacggatattgcttagtcggcgagatggacaaagcatgtggagtacttgatgccatggtatcagctggcattgagcctaatgtcattacgtatagcacacttgtcagtagatattgtaaacgtggaaggatcgatgatgggttaattctgttcagacaaatgttgcataagaaagttaaacctacaactgttacatatgaaaccatactgaatggattatttcgtgctgggagaactgctgatgcaaagaaaatgttccatgagatgatcgaaagtggaataatggtgagcatttctgcatataatataattcttggaggactttgtagaaataattgcgcagatgaagcgatcgtcctattccagaaattacgtgcaatgtatgtgaagttcaatatcacaacactcaataccatcattaatgcattgtacaaggttgaaagaagagaagaagctaatgatttgtttgctgcattaccagccagtgggttggtgcctaatgcttccacttacggagtaatggtacaaaatcttctaaaagaaggagcagtggaggaagctgacagtatgttttcatcaatggagaagagtggttgtgctcctagctctcgtcttataaatgatgtcatcagaactttattggaaaagggggagatagtcaaggccggaaaatatatgtctaaagttgatgggaagagcatctcacttgaagcttcaactagttcattgttgttgtctctcttttcagggaatgggaaatatcgggaacaactacaattgctccctgcaaagtaccaatttttcaatggaatcagt

SEQ ID NO: 1673 - DNA, 729 bp, Triticum aestivum
atgtccagcatccacctccgtcactgctccactatgcccatgtcccgcgtctgcctccgccgccgcctctcctcctcctccttctccaactgcacctcgccgccctccccaacctggtctccccacgccgcctttgccgcggccacagagcgcgtgcgagccggtacgctcagcccgcaagacgcacaccacctgttcgacgtattgtttcagcaggccattcgggtccccgagcgctcccttgatggattccttgccgccctcagccatgctacgtcctctgaagcctgcagagacggccccgccctcgccctcaccctcttcaaccgtgtctgccgagaagaagccggcatgcgggtggcgccgcacaccatcttcacctacggcatcctcatgaactgctgctgccgcgtacgtcgtccggacctagggcttgccttctttgggcgcatcctcagggcgggcctgaagacaaaccagatcgccgccaacaccgtcatcaagtgcctctgctgcgcaaaacatactgacgaggctgtcaatatgctgcttcataggatgtccgacctcggctgtgtgcctgatgccttctcatacaacaccgttctgaagagcttgtgtgaagacggcaggagcttgcaggcgctcgacctactgctccagatggttgctcccccgacgtggtggcttataacacggtcatctatggcttctttaaggaaggtgaag

SEQ ID NO: 1674 - DNA, 729 bp, Triticum aestivum; identical to SEQ ID NO: 1673

SEQ ID NO: 1675 - DNA, 1713 bp, Triticum aestivum; identical to SEQ ID NO: 1672

SEQ ID NO: 1676 - DNA, 1713 bp, Triticum aestivum; identical to SEQ ID NO: 1672

SEQ ID NO: 1677 - DNA, 729 bp, Triticum aestivum; identical to SEQ ID NO: 1673

SEQ ID NO: 1678 - DNA, 2274 bp, Triticum aestivum
atgccaaccgcccgcctgtcctccatcttcacctcctccttcaaggctccttcacgagagcgccgagctcccctcgccgccttggctgctgccacggagcgtgtgcgcgccggaacgctaagccaggaggacgcgcaccacctgttcgacgaattgctgagccaagccgccaccgtcccagtacgcgggctcaacaactttcttgctgcgctagctcgtgcaccgcccggactgctgtaccgaggcgctggtgcacgggtggtgtcgcccacgtgctgtacctattccatcctcatggactgctgctgccgtgcaggccgcccggacttggtgcttgccttcttcggccgcctcctcaggttggggctgcgctttgaggaggtcatccccttcaacaacctcctcaaggggctctgccaggccaagcgttcaaatgaggctttggacatgctgctccaccggatgcccgaactggactgtgcgcctgatgtcttctcgttcaacatagtaatcaacggctgctttaaagaaggtgaagtagacaaagcgtgcaatctcttccatgagatgccccaactgggagttcaacctgatgtggtgacctacacctcaatcatggacgcactaagcaagtccggagcaatggacaaggcagaagtgctccttcggcaaatggttgatcaaggaattgaacccaatatcaggacatatagctgtctgatccatggatattctacttttggtcagtggaaggaggcacttagggtattcaaagaaatggcaagtcttggtgttgtaccagacgttgtcacattgagctcattaatcgattccctttgcaggcacagaaggacaaagcaagctagagaaatttttgactctatggctgcaaagggcctgaaacctaatatcgtctcctactctactatgcttaatgggtatgtcaaagaaggatccttcgaggatatgaccggtctcttcaattcgatggtacggaatggtattgtacctaaccaccatattttcaacatactgatcaatgcatatgctaaacgtggactgatggatgaggctatgcacatgttcgaagtaatgaggcaacaaggagtaaacccagatgtatttggctatcaaatcataatggattcactttgtaaaatgggtaagatggatgctgctctggacaaatttaatcagatggtcaatcaaggagtttcacctaacaaagctgtttaccaatgcctggttctgggttcttgctctcatggtgattttgtgaaagccaaggaattgatttctgaagcggttaatagaggtctgtgttctaacagtgtgttcttctatcctgtaataaacgaccgttgcaaagaaggaaaggtgaaggacgcacaggatatgtttgacttcattgtaggtattggtcatcggcctgatgtgattatgtacaattcactgatggatggatattgccttgttggcaaggtggaggaagcactgagagtacttgatgctatgaagtctgctggcctccaacctgatgtttttacatatggtatacttattaatggctactgtaaaattggaaggatcgacgacggattgagtcttgtcagggaaatttcactcagtggggttaagcccacgactattatgtacaacattatacttgatgggctgttttgctctgggagaacagttcctgcaaaggaaaaattccataagatgaatgaaagtggcataccagtgggcgttggaacatacaacatagttcttagtggactttgtaaaaataattgcactgatgaagcaatagagctgttcaagaaattacgtgctgtgaacgtgaagattaatgtcataacactcactaccatggtttctgcaatgtttaaaactaggagaattgaagaagccaaggatttgtttgttactatatcagccattgggttggtgccttctgttgtgacttacagtataatgatgacaaatttcataaaagaagggttgcttgcagatgctgatgatatgttttcagcaatggagaaggctggctgtgctcacaactccagactgctaaatcaagtggtcagggtatttctgaagaatggtgaagttgtaaaggctgtgacttatcttgccaaatttgatgcaaaacagctgtcagttgaagcttcgacggtttcgttaatagtatctctcttctcaaggaaagggaaattaagggagcatgtaaaattgcttccggtaaagtaccagcctcctgagatgttggac

SEQ ID NO: 1679 - DNA, 2274 bp, Triticum aestivum; identical to SEQ ID NO: 1678

SEQ ID NO: 1680 - DNA, 1122 bp, Triticum aestivum
atgggtaagctgactgatgccatggataagttcagtcagatggttgttggtacgggagtacagccggacacagttgtttatcactccctagttcagttcttatgtacacatggtgatttggtgaaagcgaaggagttgatttctgaaatgatgaataaaagtattgctcgtccaaacactgcactctttagttcaataatggacagtctatgcaatgaaggaagggttatagatgcacaccatatctttgacttggttatagacataggtgagaaacctgatatcagtatgtttagtacgctgattgacggatattgcttagtcggcgagatggacaaagcatgtggagtacttgatgccatggtatcagctggcattgagcctaatgtcattacgtatagcacacttgtcagtagatattgtaaacgtggaaggatcgatgatgggttgattctgttcagacaaatgttgcataagaaagttaaacctacaactgttacatatgaaaccacactgaatggattatttcgtgctgggagaactgctgatgcgaagaaaatcttcgatgagatgatcgaaagtggaataatggcgagcatttctacatataatataattcttggaggactttgtagaaataattgcgcagatgaagcggtcgtcctattccagaaattacgtgcaatgaatgtgaagttcaatatcacaacactcaataccatcattaatgcattgtacaaggttgaaagaagagaagaagctaatgatttgtttgctgcattaccagtcagcgggttggtgcctaatgcttccacttacggagtgatggtacaaaatcttctaaaagaaggagcagtggaggaagctgacagtatgttctcatcaatggagaagagtggttgtgctcctagctctcgtcttgtaaatgatgtcatcagaactttattggaaaagggggagatagtcaaggccggaaaatatatgtctaaagttgatgggaagagcatctcacttgaagcttcaactagttcgttgttgttgtctctcttttcagggaatgggaaatatcgggaacaactacaattgctccctgcaaagtaccaatttttcgatggaatcagt

SEQ ID NO: 1681 - DNA, 2484 bp, Triticum aestivum
atgtccagcatccacctccgccattgctccactatgcccatgtcccgcgtctgcctccgccgccgcctctcctccttctccaactgcacctcgccgccctcaccaacctggtctccccacgccgcctttgccgcggccacggagcgcgtccgcgccggaacgctcagcccgcaagacgcacaccacctgttcgacgaattgtttcggcaggccactccggttcccgagcgctcccttgatggattccttgccgccctcggccgtgccacgccctctgaggcctgcagagacggcccctccctcgccctcaccctcttcaaccgtgtctgccgagaagaagccggcatgcgggttgcgccgccaaccatcttcacctacggcatcctcatgaactgctgctgccgtatgggtcgtccggacctagggctcgcctactttgggcgcatcctcagggcgggcctgaaggcaaaccagatcgccgccaacaccgtcatcaagtgcctctgctgcgcaaaacataccgacgaggctgtcaatatgctgcttcataggatgtccgacctcggctgtgtacctgatgccttctcatacaacacagttctgaagagcttgtgtgaagacggcaggagcttgcaggcgctcgacctactgctccagatggcgtcgaaggaaggaggtgcctgctcccccgacatggtggcatatagcacggtcatccacggcttcttgaaggaaggcaaagtagacaaggcatgcaatctattcgatgaaatgatgcggcaaggggttgtgcctgatgtggtgacgtatagctcgattatcgatgcattgtgcaaagctggagcaatgtacaaggcagagttgttccttcggcagatggttgatgatggtgttcgaccggatgaggtgacatatactagcatgatccatggatattccactttgggccggtggaaacaggtgcgtaaaatgttcagagaaatgacaagccgtggtcttataccagatactgtcacttggaactcgttcatggactccctctgcaagcatggaagaaccaaagaagctgcagaagttttcttttccatggctggaaagggcagcaagcctaatattgtctcctacactattcttcttcatgggtatgccaatgaaggaagctttgctgatatgatgagtctcttcaattcaatgaaaggcggcggcattgtagccaactgcaaagttttcaacatattaattggtgcatatgctaaacgagggctgatagatgaagctatgctcatacttactgaaatgcggggacaaggactgagtccggatgtagtcacctattcaactctaatatctgcacattggagaatgggtaagctgactgatgccatggataagttcagtcagatggttgttggtacgggagtacagccggacacagttgtttatcactccctagttcagttcttatgtacacatggtgatttggtgaaagcgaaggagttgatttctgaaatgatgaataaaagtattgctcgtccaaacactgcactcttcagttcaataatggacagtctatgcaatgaaggaagggttatagatgcacaccatatctttgacttggttatagacataggtgagaaacctgatatcagtatgtttagtacgctgattgacggatattgcttagtcggcgagatggacaaagcatgtggagtacttgatgccatggtatcagctggcattgagcctaatgtcattacgtatagcacacttgtcagtagatattgtaaacgtggaaggatcgatgatgggttgattctgttcagacaaatgttgcataagaaagttaaacctacaactgttacatatgaaaccatactgaatggattatttcgtgctgggagaactgctgatgcgaagaaaatcttcgatgagatgatcgaaagtggaataatggtgagcatttctacatataatataattcttggaggactttgtagaaataattgcgcagatgaagcggtcgtcctattccagaaattacgtgcaatgaatgtgaagttcaatatcacaacactcaataccatcattaatgcattgtacaaggttgaaagaagagaagaagctaatgatttgtttgctgcattaccagtcagcgggttggtgcctaatgcttccacttacggagtgatggtacaaaatcttctaaaagaaggagcagtggaggaagctgacagtatgttctcatcaatggagaagagtggttgtgctcctagctctcgtcttgtaaatgatgtcatcagaactttattggaaaagggggagatagtcaaggccggaaaatatatgtctaaagttgatgggaagagcatctcacttgaagcttcaactagttcgttgttgttgtctctcttttcagggaatgggaaatatcgggaacaactacaattgctccctgcaaagtaccaatttttcgatggaatcagt

SEQ ID NO: 1682 - DNA, 1122 bp, Triticum aestivum; identical to SEQ ID NO: 1680

SEQ ID NO: 1683 - DNA, 2484 bp, Triticum aestivum; identical to SEQ ID NO: 1681

SEQ ID NO: 1684 - DNA, 1011 bp, Triticum aestivum
atgcgggttgcgccgccaaccatcttcacctacggcatcctcatgaactgctgctgccgtatgggtcgtccggacctagggctcgcctactttgggcgcatcctcagggcgggcctgaaggcaaaccagatcgccgccaacaccgtcatcaagtgcctctgctgcgcaaaacataccgacgaggctgtcaatatgctgcttcataggatgtccgacctcggctgtgtacctgatgccttctcatacaacacagttctgaagagcttgtgtgaagacggcaggagcttgcaggcgctcgacctactgctccagatggcgtcgaaggaaggaggtgcctgctcccccgacatggtggcatatagcacggtcatccacggcttcttgaaggaaggcaaagtagacaaggcatgcaatctattcgatgaaatgatgcggcaaggggttgtgcctgatgtggtgacgtatagctcgattatcgatgcattgtgcaaagctggagcaatgtacaaggcagagttgttccttcggcagatggttgatgatggtgttcgaccggatgaggtgacatatactagcatgatccatggatattccactttgggccggtggaaacaggtgcgtaaaatgttcagagaaatgacaagccgtggtcttataccagatactgtcacttggaactcgttcatggactccctctgcaagcatggaagaaccaaagaagctgcagaagttttcttttccatggctggaaagggcagcaagcctaatattgtctcctacactattcttcttcatgggtatgccaatgaaggaagctttgctgatatgatgagtctcttcaattcaatgaaaggcggcggcattgtagccaactgcaaagttttcaacatattaattggtgcatatgctaaacgagggctgatagatgaagctatgctcatacttactgaaatgcggggacaaggactgagtccggatgtagtcacctattcaactctaatatctgcacat

SEQ ID NO: 1685 - DNA, 1011 bp, Triticum aestivum; identical to SEQ ID NO: 1684

SEQ ID NO: 1686 - DNA, 2484 bp, Triticum aestivum; identical to SEQ ID NO: 1681

SEQ ID NO: 1687 - DNA, 2484 bp, Triticum aestivum; identical to SEQ ID NO: 1681

SEQ ID NO: 1688 - DNA, 2439 bp, Triticum aestivum
atgtcccgcctccacctcctccgccgccgctgctccacctccatttccacctcgccgccttcacgctcctggtctccccgcgctgcctttgccgctgccacagagcgcgtccgcgccgggacgctcagcccggaagacgcacaccacctgttcgaccaattgctgcggcagtccaccccagtccccgagcgctccctgaatggattccttgccgccctcgtccgtacgccggcctcagaatcctgcagagacgggccctccctcgccctcgccctcttcaaccgtgtctgccgagaagaagccggcctgcgggtggcgccgcccaccatcttcacctacaacatcctcatgaactgctgttgcctggcgcgtcgcccggacctaggacttgcctttttcggccgcctcctcaggactggcctgaagacaaaccagagcttcgccaacaccctcctcaagtgcctctgctgcgcaaaacagacagacgaggctgtcagcgtgctgcttcataggatgtccgacctcggctgtgtgcctgatgacttctcatacaacacagttctaaagagcttgtgtgaagatagcaggagccggcgagcgctcgacctgctccagatgatggcgaaagaaggaggtgtctgctcccctgatgtggtcacatataacacagtcatccatggcttctttaaggaaggtgaaataggcaaggcctgcaatctattccatgaaatgatgcagcaaggggttgtgcctaatgtggtgacatataactcgattatcgatgcattgtgcaaggcccgagcaatggacaatgcagagttgttccttcgcatgatggttgataacggtgttccaccagataaggtgacatatactagcatgatccatggatattccactttgggccgatggaaagaggcaactaaaaagttcagagaaatgacaagcaggggtcttataccaggtattatcacttggaactcgttcatggactccctctgcaagcatggaagaagcaaagaagttgcagaaatttttcattccatgtctgcaaagggccacaagcctgatatcatctcctacaccactcttcttcatgggtatgccaatgaaggaagctttcctgatatgatgagtctctttaagtcaatggaaggcaacggtattgtagccaactgccaagttttcaacatattaattgatgcatatgctaaacgaggaatgatggacgaagctatgctcatatttaccgaaatgctaggacaaggagtcaatccgagtgtaatcacctactcaattgtgatagctgcactttgcagaatgggtaggctggccgatgctatggatacgttcagtcagatgatttctgttggaatgaaaccggacacagttgtttatcattccctaattcagggtttctctacacatggcgatttggtcaaagcgaaagaactgatatatgaaatgatgaacaacggtattcctcgtccaaacagtgtattcttcagttcaatagtaaacagtctatgcaaagaggggagggttgtggatgcacatcatatcttcgacttggttaaagacttaggtgagagacctaacatcattatgtttactacgctgattgacggatattgcttagtcggtgagatggacaaagcattcagagtacttgatgccatggtattagctggcgttgagcctgatgtcgttacatatagtacacttgtcaatggctattgtagtaatggaaggatcgatgatgggttgattctgttcagagaaatgttgcataagaaagttaaacctacaactgttacatataacatcatactggatcgattatttcgtgccgggagaacagttgctgcaaagaaaatgctccatgagatgatcggaagtggaacacctgtgagcatgcatacatacggcatatttcttagaggactttgtaggaacgattgcaccgatgaagcaattgccctgtttcaaaaattaggtgcactgaatgtgaacttcgatattacaatactcaattccatgattaatgcaatgtacagggttcagagaagagaagaagctaacaagttgtttgctgctatatcaaccagtgggttggtacctaatgcttccacttatggaatcatgatcagaaatcttctaaaagagggatcagtggaagaagctgaagacatgttttcatcaatggaggagagtgactgtgctctcagctctcgtcttataaatgatatcattagaacattattggaaaagggggatatagtcaaggccggaaaatacatgtctaaagttgatgaaacgagcatctcacttgaagcttcaactagttcgttgttgttgtctctcttttccgggaaagggaaatgtcgggaacaaatagaattgctccctgcaaagtaccaaattttcgatggaatcagt

SEQ ID NO: 1689 - DNA, 2439 bp, Triticum aestivum
atgtcccgcctccacctcctccgccgccgctgctccacctccatttccacctcgccgccttcacgctcctggtctccccgcgctgcctttgccgctgccacagagcgcgtccgcgccgggacgctcagcccggaagacgcacaccacctgttcgaccaattcctgcggcagtccaccccagtccccgagcgctccctgaatggattccttgccgccctcgtccgtacgccggcctcagaatcctgcagagacgggccctccctcgccctcgccctcttcaaccgtgtctgccgagaagaagccggcctgcgggtggcgccgcccaccatcttcacctacaacatcctcatgaactgctgttgcctggcgcgtcgcccggacctaggacttgcctttttcggccgcctcctcaggactggcctgaagacaaaccagagcttcgccaacaccctcctcaagtgcctctgctgcgcaaaacagacagacgaggctgtcagcgtgctgcttcataggatgtccgacctcggctgtgtgcctgatgacttctcatacaacacagttctaaagagcttgtgtgaagatagcaggagccggcgagcgctcgacctgctccagatgatggcgaaagaaggaggtgtctgctcccctgatgtggtcacatataacacagtcatccatggcttctttaaggaaggtgaaataggcaaggcctgcaatctattccatgaaatgatgcagcaaggggttgtgcctaatgtggtgacatataactcgattatcgatgcattgtgcaaggcccgagcaatggacaatgcagagttgttccttcgcatgatggttgataacggtgttccaccagataaggtgacatatactagcatgatccatggatattccactttgggcggatggaaagaggcaactaaaaagttcagagaaatgacaagcaggggtcttataccaggtattatcacttggaactcgttcatggactccctctgcaagcatggaagaagcaaagaagctgcagaaatttttcattccatgtctgcaaagggccacaagcctgatatcatctcctacaccactcttcttcatgggtatgccaatgaaggaagctttcctgatatgatgagtctctttaagtcaatggaaggcaacggtattgtagccaactgccaagttttcaacatattaattgatgcatatgctaaacgaggaatgatggacgaagctatgctcatatttaccgaaatgctaggacaaggagtcaatccgagtgtaatcacctactcaattgtgatagctgcactttgcagaatgggtaggctggccgatgctatggatacgttcagtcagatgatttctgttggaatgaaaccggacacagttgtttatcattccctaattcagggtttctctacacatggcgatttggtcaaagcgaaagaactgatatatgaaatgatgaacaacggtattcctcgtccaaacagtgtattcttcagttcaatagtaaacagtctatgcaaagaggggagggttgtggatgcacatcatatcttcgacttggttaaagacttaggtgagagacctaacatcattatgtttactacgctgattgacggatattgcttagtcggtgagatggacaaagcattcagagtacttgatgccatggtattagctggcgttgagcctgatgtcgttacatatagtacacttgtcaatggctattgtagtaatggaaggatcgatgatgggttgattctgttcagagaaatgttgcataagaaagttaaacctacaactgttacatataacatcatactggatcgattatttcgtgccgggagaacagttgctgcaaagaaaatgctccatgagatgatcggaagtggaacacctgtgagcatgcatacatacggcatatttcttagaggactttgtaggaatgattgcaccgatgaagcaattgccctgtttcaaaaattaggtgcactgaatgtgaacttcgatattacaatactcaattccatgattaatgcaatgtacagggttcagagaagagaagaagctaacaagttgtttgctgctatatcaaccagtgggttggtacctaatgcttccacttatggaatcatgatcagaaatcttctaaaagagggatcagtggaagaagctgaagacatgttttcatcaatggaggagagtgactgtgctctcagctctcgtcttataaatgatatcattagaacattattggaaaagggggatatagtcaaggccggaaaatacatgtctaaagttgatgaaacgagcatctcacttgaagcttcaactagttcgttgttgttgtctctcttttccgggaaagggaaatgtcgggaacaaatagaattgctccctgcaaagtaccaaattttcgatggaatcagt

SEQ ID NO: 1690 - DNA, 2439 bp, Triticum aestivum; identical to SEQ ID NO: 1688

SEQ ID NO: 1691 - DNA, 2439 bp, Triticum aestivum; identical to SEQ ID NO: 1689

SEQ ID NO: 1692 - DNA, 2439 bp, Triticum aestivum; identical to SEQ ID NO: 1688

SEQ ID NO: 1693 - DNA, 2439 bp, Triticum aestivum; identical to SEQ ID NO: 1689

SEQ ID NO: 1694 - DNA, 2109 bp, Triticum aestivum
atgccagccgcccgcctgtcctccttcaaggctccttcacgagagcgccgacctcccctcgccgccttggctgccgccacggagcgcgtccgcgccggaacgctaagtcggcaggacgcgcaccacctgttcgacgaattgctgagccaagccgcgacagtcccagtacgcaagctgaacaactttcttgccgccctcgcccgtgcaccgccctcagctgcctgcagcgatggtccggaccttgccatcgccctcttcaaccgcatgtcccgaggcgctggtgcacgggtggtgtcgcccacgctctctacctattccatcctcatggactgctgctgccgtgcacgccgcccagagttggtggttgccttcttcggccgcctcctcaggttggggctgcgcttggatatcatctcctccagcaatctcctcaaggggctctgccaggccaagcgttcaaatgaggctttggacatgctgctccaccggatgcccgaactggactgtgcgcctgatgtcttctcgttcaacatagtaatcaacggctgctttaaagaaggtgaagtagacaaagcgtgcaatctcttccatgagatgccccaactgggagttcaacctgatgtggtgacctacacctcaatcatggacgcactaagcaagtccggagcaatggacaaggcagaagtgctccttcggcaaatggttgatcaaggaattgaacccaatatcaagacatataactgtctgatccatggatattctacttttggtcagtggaaggcggcagttagagtattcaaagaaatggcaagtgttggtgttcaaccaaatgctgtcactttgaactcattaatcgattccctttgcaagcacagaaggacaaaggaagctagagaaattcttgactccatggccgcaaagggcctgaaacctaatatcgtctcctactctactatgcttaatgggtatgtcaaagaaggatgcttcgatgatatgactgatctcttcaattcgatggtacggaatggtatcgtacctaaccaccatattttcaacatactgatcaatgcatatgctaaacgtggagtgatggatgaggctatgcacatgttcgaagtaatgaggcaacaaggagtaaatccagatgtatttagctatcaaattgtaatggattcactttgcaaaatgggcaggatggatgctgctctggacaaatttaatcagatggtcaatcaaggagtttcacctaacaaagctgtttaccaatgcctggttctgggttcttgctctcatggtcattttgtgaaagccaaggaattgatttctgaagtggttaatagaggtctgtgttctaacagtgtgttcttctatcctgtaataaacggcctttgcaaagaaggaaaggtaaaggaggcacaggatatgtttgacttcatcctaggtattggtcagcggcctgatgtgattatgtacacttcactgatggatggatattgccttgttggcgaggtggagaaagcactgagtgtactcgatgctatgaaatctgctggccttcaacctgatgatgttgtatatgctacacttcttaacggttactgtaaaattggaaggatcgccgatggattgagccttttcagggaaatgtcactcagcggggttaagcccatgactattatatacaacattatactggatgggctgttttgctccgggagaacagtttgtgcaaaggaaaaattcaatacgatgactgaaagtggcataccagtgggcgttgacacatacaacatactccctctggaaagatttataagacgttttagaaagtgtagttcaaatctcggcacgttaagaaaattcggtcgtttccatttttgcccctgcgctcactcactcacccgcactcacccattcccctctcgcactcactcgcccgcgtcgacgtctccctgcccgaatccggcgcggtggcgacgctcctccctctcgcccgcgtcgacacctccccctcggccgcttcgcagcctcccttctcctcttgtcgccgcctctccctctcctcgcccgcgttgtctagccaaaattgttttcttagtgaggtcagga

SEQ ID NO: 1695 - DNA, 2109 bp, Triticum aestivum; identical to SEQ ID NO: 1694

SEQ ID NO: 1696 - DNA, 825 bp, Triticum aestivum
atgccgagaagaagccggcccgcaggtggcatcctcatgggctgcttctgcggtgcgcatcgcccggacctagggcttgccttatttggccgcttcctcgggacaggcctcaagacaaacaagattgtggccaccaccttcctcaagtgcctctgctacgccaaacgtacagatgaggctgtcaacttgctgcttcgtaggatgcccgagcttggctgcgtgcctgatgcaatctcatacaccattgttctgaagagcttatgcgagaatagcatgagtcagcgggcacttgacctgctccagatggtggcagaaggaggaggtgcctgctccctcaatgtggtggtgtatagcacagtcatccatggcttcttcaaggagggcgaaacaggcaaggcatgcaatctattccatgaaatgatccatcaaggggttgtgcccaatgtggtcacgtatagctcgattattgatgcgttgtgcaaggccagagcaatggacaaggcagagctagtccttcaacagatggttgatagtggtgctcaaccgaataatgtgacatataattgcatgatccatggatattccacatcagggcagttgaaagaggctgctaaaatgtttagaaaaatgacaagccatggtcttgtaccaaatgcagtcacttgcagctcgttaatgacttccctttgcaagcatggaagaagcaaagaagcggcggaaatattttattccatgactgccaagggccacaaaccggatgccgtctcgtaccgtattttgcttcatgggtatgccaatgaaggatgctttgctgatatgattgat

SEQ ID NO: 1697 - DNA, 825 bp, Triticum aestivum; identical to SEQ ID NO: 1696

SEQ ID NO: 1698 - DNA, 2421 bp, Triticum aestivum
atgccagccgcccgcctgtcctccatctccacctcctccttcaaggctccttcacgagagggccgagcccccctcgccgccttggctgctgccacggagcgcgtcctcgccggaacgctaagtcgccaggacgcgcaccatctgttcgacgaattgctgagccaagccgccgccgtcccggaacgcgggctcaacaactctcttgccgcactcgcccgtacaccgccctcagctgcctgcagcgatggccccggccttgccatcgccctcttcaaccgcatgtccagaggtgccggtgcactagtggcatcgtccacactctgtacctattccatcctcatggactgctgctgtcgcgcaggccgcccggacctggttgttgccttcttcggccgcctcctcaggttggggctgcgcttgaatgtcatctccttcaacaacctcctcaaggggctttgccaggctaagcgctcaaatgaggcattggatctgctgctccaccggatgcccgaactggactgtgcgcctgatgtcttctcgttcaacatagtaatcaacggctgctttagagaaggtgaagtagacaaagcatgcaatctcttccatgagatgccccaactgggagttcaacctgatgtggtgatctacaactcaattatcgacacactaagcaaatccggagcaatggacaaggcagaagtggtccttcgtcaaatggttgataaaggcattggacccgatgtcatgacatataacagtctgatccatggatattctactttgggtcagtggaaggcagcagttagggtattcaaagagatggtaagtgttggtgttctaccaaatgctgtcacgttgaactcatttatggattcactttgcaagcatagaagaacaaaggaagctagagatatttttgactccatggctgcaaagggccacaaacctaatattgcctcctactctactatgcttaatgggtatgcgaaacaaggatgcttcgacgatatgactggtctcttcaattccatggtacagaacggtattgtacctaacaaccatgttttcaacatactgatcagagcatattctacacgtggactgatggacaaggctatgcacatgttcgaagtaatgaagcaacaaggagtaaacccaaatgtagttgactatctagtaataatggattcactttgtaaaatgggtaggatggatgctgctctggacaaatttaatcagatggtcaatcaaggagtttcacctgacaaagttgtttaccgatgcctggttttaggttcttgctctcatggtcattttgtgaaagccaaggaattgatttctaaagcagttaatagaggtctatgttctaacagtgagttcttctatcctgtaataaacgacctgtgcaaagaaggaaaggtgaaggaggcacaggatatgtttgacttcattgtaggtattggtcagcggcctgatgtgattatgtacaattcactgatggatggatattgccttgttggcaaggtggaggaagcagtgagagtacttgatgctatgaagtctgctggcctccaacctactgctgttacgtatgctatacttcttaatggctactgtaaaattggaaggatcgccgctggattgagtcttttcatggaaatgtcactcagcggggttaagcccactactattatgtacaacattatacctgatgggctgttttgctctgggagaacagtttctgcaaaggagaaattcaatacgatgattgaaagtggcataccagtgggcgttgacacatacaacatagttcttcatggactttgtagaaacaattgcactgatgaagcaatagatttgttcaaaaaattatgtgcaagaaacgtgaagattgatgtcataacattcaataccgtgatttctgcaatgtttaaaactaggagaattgaagaagccaaggatttgtttgctactataccagccatcggattggtgccttctgttgtgacttacagtttaatgatgacgaatttcataaaagaagggtcgctggcagaggctgatgatatgtttttagcaatggagaaggatggctgtgctcctgactccagactgctaaatcaagtggtcagggtgttgctggaaaaaggtgcagttgtacaggctgcaacttatctggctaaacttgatgcaaaacaaatgtcacttgaagtgtcaacgatttcgttaattgtatatctcttctcaaggaaagggaaattaagggagcacgtaaaattgcttccgatgagtaccagcctccggagatgtcctactgatgttacttggtggtattcactcatagctgacagaatgtcattgcccccacctgccgtttttgaaaatgcagataattcatccattttgctgttgcctgatgtt

SEQ ID NO: 1699 - DNA, 1218 bp, Triticum aestivum
atggactgttgctgccgcgcgcgtcgcccggacctagggcttgccttattcggacgcttcctcaggacaggcctgaagacaaatgagatcatcgccaacaccttcctcaagtgcctctgctatgccaaacgtacaaatgaggctatcaacttgctgcttcataggatgcccgagcttggctgcgtgcctgatgccttctcatacaacattgttctgaagagcttatgcgagaatagcatgagtcagcgggcactcgacctgctccagatggtggcagaaggaggaggtgcctgctccctcaatgtggtggcgtatagcacagtcatccatggcttcttcaaggagggcgaaacaggcaaggcatgcaatctattccatgaaatgatccatcaaggggttgtgcccaatgtggtcacgtatagctctattattgatgcgttgtgcaaggccagagaaatggacaaggcagagctagtccttcaacagatggttgatagtggtgctcaaccgaataatgtgacatataattgcatgatccatggatattccacatcagggcagttgaaagaggctgctaaaatgtttagaaaaatgacaagccatggtcttgtaccaaatgcagtcacttgcagctcgttaatgacttccctttgcaagcatggaagaagcaaagaagcggcagaaatattttattccatgactgccaagggccacaaaccggatgccgtctcgtaccgtattttgcttcatgggtatgccactgagggatgctttgctgatatgattgatctcttcaattcaatggaaagcaatggttttgtagcagactgccatgttttcaccatattaattgatgcatatgctaaacgtggaatgatggatgaagctatgctcatatttaccgaaatgcaggaaaaaggagtgagtcccaatgtagtcacctattccactgtaatagccgcactttgcagattgggtaggctggccgatgctatggacaagttcaatgagatgattgatatgggtgttcagccgggcacaactgtttatcactccctaattcaggggttttgtatgcatgtagatttggttaaagccaaggagttagtttctgacatgataagcaaaggtattcctcgtcccaacattgtttttcttcaattcagttataaactatttgtgcaaagaaggacgggttatggatgcacaagatatctt

SEQ ID NO: 1700 - DNA, 894 bp, Triticum aestivum
atggatgcacaagatatctttgaattggttataagcatagatgggaagcctgatgtcattacatttaactcactgattgacggatattgcttagtcggcaagatggataaagcatttggagtacttgatgccatggtgtcagctggcattgagcctaatgttgttacatataatacacttgttaatggctattctagaaatggaaggatcgatgatggtttgactctgttcaggcaaatgccacgtaagagaataaaacctgacagtgctacatatggcatcatactggatgggttgtttcgtgctgggagaactgttgctgcaaggaaaatgttccatgagatgatcgaaagcggaataacagtgagcatttccacatacaatattatacttgcaggtctttctagaaacaattgtgcagaagaagcgatcgacttgtaccagaaattagttgcaatgaatgtgaagttcaatatttcaataatcaataccatgatcaatgcaatgtacaaggttaaaagaaaagaggaagctaaagatttgtttgctgctatatcagcgagtgggttggttcctaatgcttcgacttatggagtaatgataataaatattctaaaagatggagcagtggaagatgctaacaatatgttctcagcaatggacaggaatggtatagctccctgctctcgtcttataaatagtattatcagaattttgctggaaaaaggtgagatcaccatggccggactttatttgtcgaaacttgacgggaagaacatgttacttgaagcttcaactacttcactgatgttgtctctcttttcaaggaaagggaaatataaggaggatgtgaaatttctccctgcaaagtatcagttttttgatggatttggt

SEQ ID NO: 1701 - DNA, 2472 bp, Triticum aestivum
atgtcccgcctccgcctccgccgctcctccaccacgccgatgttccacctcctccgccgcagctcctcctctacctccatctcgcccccctcacgttcctggtctcccgaaggcgcctttgccgcggccacggcgcgcgtcagcgctggaacgctcagccctgaagaagcacaccacctgttcgacgaattgctgcggcagggcaccccggtccccagccgctccctgaacggcttccttgccacccttgcccgtgcgcccgcctccgcagcctacagcagagatggccctgccctcgccctcgctctcttcaaccgcgtgtgcacagaaaaagccggctcgcgggtggcgcatctcacagtccacacctacggcatcctcatggactgctgctgccgcgcgcgtcgcccggacctagggcttgccttattcggacgcttcctcaggacaggcctgaagacaaatgagatcatcgccaacaccttcctcaagtgcctctgctatgccaaacgtacaaatgaggctatcaacttgctgcttcataggatgcccgagcttggctgcgtgcctgatgccttctcatacaacattgttctgaagagcttatgcgagaatagcatgagtcagcgggcactcgacctgctccagatggtggcagaaggaggaggtgcctgctccctcaatgtggtggcgtatagcacagtcatccatggcttcttcaaggagggcgaaacaggcaaggcatgcaatctattccatgaaatgatccatcaaggggttgtgcccaatgtggtcacgtatagctctattattgatgcgttgtgcaaggccagagcaatggacaaggcagagctagtccttcaacagatggttgatagtggtgctcaaccgaataatgtgacatataattgcatgatccatggatattccacatcagggcagttgaaagaggctgctaaaatgtttagaaaaatgacaagccatggtcttgtaccaaatgcagtcacttgcagctcgttaatgacttccctttgcaagcatggaagaagcaaagaagcggcagaaatattttattccatgactgccaagggccacaaaccggatgccgtctcgtaccgtattttgcttcatgggtatgccactgagggatgctttgctgatatgattgatctcttcaattcaatggaaagcaatggttttgtagcagactgccatgttttcaccatattaattgatgcatatgctaaacgtggaatgatggatgaagctatgctcatatttaccgaaatgcaggaaaaaggagtgagtcccaatgtagtcacctattccactgtaatagccgcactttgcagattgggtaggctggccgatgctatggacaagttcaatgagatgattgatatgggtgttcagccgggcacaactgtttatcactccctaattcaggggttttgtatgcatgtagatttggttaaagccaaggagttagtttctgacatgataagcaaaggtattcctcgtcccaacattgtgttcttcaattcagttataaactatttgtgcaaagaaggacgggttatggatgcacaagatatctttgaattggttataagcatagatgggaagcctgatgtcattacatttaactcactgattgacggatattgcttagtcggcaagatggataaagcatttggagtacttgatgccatggtgtcagctggcattgagcctaatgttgttacatataatacacttgttaatggctattctagaaatggaaggatcgatgatggtttgactctgttcaggcaaatgccacgtaagagaataaaacctgacagtgctacatatggcatcatactggatgggttgtttcgtgctgggagaactgttgctgcaaggaaaatgttccatgagatgatcgaaagcggaataacagtgagcatttccacatacaatattatacttgcaggtctttctagaaacaattgtgcagaagaagcgatcgacttgtaccagaaattagttgcaatgaatgtgaagttcaatatttcaataatcaataccatgatcaatgcaatgtacaaggttaaaagaaaagaggaagctaaagatttgtttgctgctatatcagcgagtgggttggttcctaatgcttcgacttatggagtaatgataataaatattctaaaagatggagcagtggaagatgctaacaatatgttctcagcaatggacaggaatggtatagctccctgctctcgtcttataaatagtattatcagaattttgctggaaaaaggtgagatcaccatggccggactttatttgtcgaaacttgacgggaagaacatgttacttgaagcttcaactacttcactgatgttgtctctcttttcaaggaaagggaaatataaggaggatgtgaaatttctccctgcaaagtatcagttttttgatggatttggt

SEQ ID NO: 1702 - DNA, 894 bp, Triticum aestivum; identical to SEQ ID NO: 1700

SEQ ID NO: 1703 - DNA, 1218 bp, Triticum aestivum; identical to SEQ ID NO: 1699

SEQ ID NO: 1704 - DNA, 2472 bp, Triticum aestivum; identical to SEQ ID NO: 1701

SEQ ID NO: 1705 - DNA, 894 bp, Triticum aestivum; identical to SEQ ID NO: 1700

SEQ ID NO: 1706 - DNA, 894 bp, Triticum aestivum; identical to SEQ ID NO: 1700

SEQ ID NO: 1707 - DNA, 1218 bp, Triticum aestivum; identical to SEQ ID NO: 1699

SEQ ID NO: 1708 - DNA, 1218 bp, Triticum aestivum; identical to SEQ ID NO: 1699

SEQ ID NO: 1709 - DNA, 1605 bp, Triticum aestivum
atgatggtgttggaccttaatgtgacgtatagtagcctcatccatggatattcctcttcaggccactggaaggaggcagttagggtattcaaagagatgacaagtcggagggttacagcagatgtgcatacttacaacatgtttatgacctttctttgcaaacatggaagaagcaaagaagctgcaggaatttttgataccatggctatcaagggcctgaaacctgacaacgtttcatatgctattctccttcatgggtatgccgccgaaggatgcttagttgatatgattaatctcttcaattcaatggaaagagattgtattctacctgactgtcgtatcttcaacatactgattaatgcatatgctaaatctgggaagcttgataaggctatgcttatcttcaatgaaatgcagaaacaaggagtgagtccaaatgcagtcacatattcaaccgtaatacatgcattttgcaagaagggtaggttggatgatgctgtgataaagtttaatcagatgattgatacaggagtacgaccggacgcatctgtttatcgtcccctaatccagggtttttgtacacatggcgatttggtgaaagcaaaggaatatgttactgaaatgatgaagaaaggtatgcctcctcctgatattatgttcttcagttcaatcatgcagaacctatgcacagaaggaagggtaacagaagcacgggatatccttgacttgatagtgcacattggtatgaggcctaatgttatcatatttaatttgctgatcggtggatactgcctagtccgcaagatggcagatgcattgaaagtatttgatgatatggtgtcatatggtttagaaccttgtaactttacgtatggtatacttattaatggctattgcaaaaatagaaggattgatgacgggcttattctgttcaaagagatgctgcacaagggacttaaacctacaacttttaattataacgtcatactggatggattatttctggctggacaaactgttgctgcaaaagagaagtttgatgagatggttgaatctggagtaagtgtgtgcattgatacatactctataattcttggtggactttgtagaaatagctgcagtagcgaagcgatcacccttttccggaaattaagcgcaatgaatgtgaaatttgatattacaattgtcaatatcattattggtgccttatacagggtcgagagaaaccaagaggctaaggatttgtttgctgctatgccagccaatggcttggttcctaatgctgttacctacaccgtaatgatgacaaatcttataaaagaaggttcagtggaagaagctgacaatcttttcttatccatggagaagagcggctgtactgccaactcttgcctgttaaatcatatcatcagaaggttactggaaaaaggagagatagtcaaggctggaaattatatgtctaaagttgatgcaaagagctactcacttgaagctaaaactgtttcgctgctgatctctctgttttcaaggaaagggaaatatagagaacacatcaaattgcttcctacaaagtatcagtttctggaagaagcagccacagttgaa

SEQ ID NO: 1710 - DNA, 2364 bp, Triticum aestivum
atgccccgcttctcctccaccacgccaatgtcgccaccccgcctccgcctccgactctgcgcccgccactcctcctccacctctcatccctcacgcatctgggatccccacgccgccttcgccgccgcggcacagcgggcgagctctggcacgctcactacggaggacgcacaccacctgtttgacgaattgctgcggcggggcaatcctgtccaggagcgtcccttgaataaatttctggctgccctcgcccgcgcgcccgcgtccgcatcctgctgcgatggccccgccctggcagtcgccctcttcggccgtttgtcccgagacgtcggacgacgggtggcgcagccaaatgtcttcacctatggcgtcctcatggactgctgctgccgcgcttgccgcacagatctggtgctcgccttctttggccgtctcctcaagacgggcctggaggcaaaccaagtcgtcttcaacaccctcctcaagggcctttgccacacaaagcgggcggatgaggctctggacgtgctgcttcacaggatgcctgagctgggctgcactcctaatgtggtggcgtataacaccgttatccatggcttctttaaggaaggccatgtaagcaaggcctgcaatctgttccatgaaatggcgcagcagggcgttaagcctaatgtggtgacatataactcagttatcgatgcgctgtgcaaggccagagccatggacaaggcagaggtggtccttcgtcagatgattgatgatggtgttggacctgataatgtgacgtatagtagcctcatccatggatattcctcttcaggccactggaaggaggcagttagggtattcaaagagatgacaagtcggagggttacagcagatgtgcatacttacaacatgtttatgacctttctttgcaaacatggaagaagcaaagaagctgcaggaatttttgataccatggctatcaagggcctgaaacctgacaacgtttcatatgctattctccttcatgggtatgccgccgaaggatgcttagttgatatgattaatctcttcaattcaatggaaagagattgtattctacctgactgtcgtatcttcaacatactgattaatgcatatgctaaatctgggaagcttgataaggctatgcttatcttcaatgaaatgcagaaacaaggagtgagtccaaatgcagtcacatattcaaccgtaatacatgcattttgcaagaagggtaggttggatgatgctgtgataaagtttaatcagatgattgatacaggagtacgaccggacgcatctgtttatcgtcccctaatccagggtttttgtacacatggcgatttggtgaaagcaaaggaatatgttactgaaatgatgaagaaaggtatgcctcctcctgatattatgttcttcagttcaatcatgcagaacctatgcacagaaggaagggtaacagaagcacgggatatccttgacttgatagtgcacattggtatgaggcctaatgttatcatatttaatttgctgatcggtggatactgcctagtccgcaagatggcagatgcattgaaagtatttgatgatatggtgtcatatggtttagaaccttgtaactttacgtatggtatacttattaatggctattgcaaaaatagaaggattgatgacgggcttattctgttcaaagagatgctgcacaagggacttaaacctacaacttttaattataacgtcatactggatggattatttctggctggacaaactgttgctgcaaaagagaagtttgatgagatggttgaatctggagtaagtgtgtgcattgatacatactctataattcttggtggactttgtagaaatagctgcagtagcgaagcgatcacccttttccggaaattaagcgcaatgaatgtgaaatttgatattacaattgtcaatatcattattggtgccttatacagggtcgagagaaaccaagaggctaaggatttgtttgctgctatgccagccaatggcttggttcctaatgctgttacctacaccgtaatgatgacaaatcttataaaagaaggttcagtggaagaagctgacaatcttttcttatccatggagaagagcggctgtactgccaactcttgcctgttaaatcatatcatcagaaggttactggaaaaaggagagatagtcaaggctggaaattatatgtctaaagttgatgcaaagagctactcacttgaagctaaaactgtttcgctgctgatctctctgttttcaaggaaagggaaatatagagaacacatcaaattgcttcctacaaagtatcagtttctggaagaagcagccacagttgaa

SEQ ID NO: 1711 - DNA, 774 bp, Triticum aestivum
atgccccgcttctcctccaccacgccaatgtcgccaccccgcctccgcctccgactctgcgcccgccactcctcctgcacctctcatccctcacgcatctgggatccccacgccgccttcgccgccgcggcacagcgggcgagctctggcacgctcactacggaggacgcacaccacctgtttgacgaattgctgcggcggggcaatcctgtccaggagcgtcccttgaataaatttctggctgccctcgcccgcgcgcccgcgtccgcatcctgctgcgatggccccgccctggcagtcgccctcttcggccgtttgtcccaagacgtcagacgacgggtggcgcagccaaatgtcttcacctatggcgtcctcatggactgctgctgccgcgcttgccgcacagatctggcgctcgccttctttggccgtctcctcaagacgggcctggaggcaaaccaagtcgtcttcaacaccctcctcaagggcctttgccacacaaagcgggcggatgaggctctggacgtgctgcttcacaggatgcctgagctgggctgcactcctgatgtggtggcgtataacaccgttatccatggcttctttaaggaaggccatgtaagcaaggcctgcaatctgttccatgaaatggcgcagcagggcgttaagcctaatgtggtgacatataactcagttatcgatgcgctgtgcaaggccagagccatggacaaggcagaggtggtccttcgtcagatgattgatgatggtgttggacct

SEQ ID NO: 1712 - DNA, 2364 bp, Triticum aestivum; identical to SEQ ID NO: 1710

SEQ ID NO: 1713 - DNA, 1626 bp, Triticum aestivum
atgccgaccggccggctgtcctccatcttcaccagcaatgcaacctcctccttcagggctccttcgccacagccacgagcccccctcgccgccttggctgccgccacggagcgcgtccgcgccggaacgctaagtcggcaggacgcgcaccacctgttcgacgaattgctgagccaagccgcgacagtcccagtacgcacgctcaacaattttcttgccgccctcgcccgtgctccgccctcagctgcctgtggcgatggccctgcccttgccatcgccctcttcaaccgcatgtcccaaggcgctggtgcacgggtggtgtcgcccacgctctgtacctattccatcctcatggactgctgctgccgcgcaggccgcccggacttggtggttgccttcttcggccgcctcatcaggttggggctgcgcttgaatgtcatccccttcaacaacctcctcaaggggctttgcaaggccaagcgctcaaatgaggcattggatctgctgctccaccggatgcccgaactggactgtgcgcctgatgtcttctcgtacagcatagtaatcaacggctgttttaaagaaggtgaagtagacaaagcgtgcaatctcttccatgggatgatccaactgggagttcaacctaatgtggtcatctacacctcaattatcgatgcactaagcaagtgcggagccatggacaaggcagaagtggtctttcggcaaatggttgataaaggtattggacccgatgtcatgacatgcactagtctgatccatggatattccatttcgggtaggtggaaggcggcagtaagggtattcaaagagatgataagtcttggtgttgtaccagataccgtcatgtggaactcatttgtggattcactttgcaagcatagaaggacaaaggaagctagagttatttttgactccatggctgcaaagggccagaaacctgatactgtctcctactctattatgcttaacgggtatgtgaaagaaggatgctttgatgatatgaccggtctcttcaattcgatgctacagaacggtgttgtacctaaccaccatattttcaacatactgatcaatgcatatgctaaacgtggactgatggatgaggctatgcacatgttcgaagtaatgaggcaacaaggagtaaacccagatgtagttgactatctagtagtaatggattcactttgcaaaatgggtaggatggatgctgctctggacaaatttaatcagatggtcaatcaaggagtttcacctaacaaagctgtttaccaatgcctggttctgggttcttgctctcatggtgattttgtgaaagccaaggaattgatttctgaagcacttaatagaggtctctgttctaacagtgtgttcttctatcctgtaataaacgacctgtgcaaagaaggaaaggtgaaggaggcacaggatatgtttgacttcattgtaggtattggtcagcggcccgatgtgattatgtacaattcactgatggatggatattgccttgttggcaaggtggaggaagcactgagagtacttgatgctatgaagtctgctggcctccaacctgatgctattatgtatggtatacttcttaatgatcac

SEQ ID NO: 1714 - DNA, 2328 bp, Triticum aestivum
atgccgaccggccggctgtcctccatcttcaccagcaatgcaacctcctccttcagggctccttcgccacagccacgagcccccctcgccgccttggctgccgccacggagcgcgtccgcgccggaacgctaagtcggcaggacgcgcaccacctgttcgacgaattgctgagccaagccgcgacagtcccagtacgcacgctcaacaattttcttgccgccctcgcccgtgctccgccctcagctgcctgtggcgatggccctgcccttgccatcgccctcttcaaccgcatgtcccaaggcgctggtgcacgggtggtgtcgcccacgctctgtacctattccatcctcatggactgctgctgccgcgcaggccgcccggacttggtggttgccttcttcggccgcctcatcaggttggggctgcgcttgaatgtcatccccttcaacaacctcctcaaggggctttgcaaggccaagcgctcaaatgaggcattggatctgctgctccaccggatgcccgaactggactgtgcgcctgatgtcttctcgtacagcatagtaatcaacggctgttttaaagaaggtgaagtagacaaagcgtgcaatctcttccatgggatgatccaactgggagttcaacctaatgtggtcatctacacctcaattatcgatgcactaagcaagtgcggagccatggacaaggcagaagtggtctttcggcaaatggttgataaaggtattggacccgatgtcatgacatgcactagtctgatccatggatattccatttcgggtaggtggaaggcggcagtaagggtattcaaagagatgataagtcttggtgttgtaccagataccgtcatgtggaactcatttgtggattcactttgcaagcatagaaggacaaaggaagctagagttatttttgactccatggctgcaaagggccagaaacctgatactgtctcctactctattatgcttaacgggtatgtgaaagaaggatgctttgatgatatgaccggtctcttcaattcgatgctacagaacggtgttgtacctaaccaccatattttcaacatactgatcaatgcatatgctaaacgtggactgatggatgaggctatgcacatgttcgaagtaatgaggcaacaaggagtaaacccagatgtagttgactatctagtagtaatggattcactttgcaaaatgggtaggatggatgctgctctggacaaatttaatcagatggtcaatcaaggagtttcacctaacaaagctgtttaccaatgcctggttctgggtttttgctctcatggcgattttgtgaaagccaaggaattgatctctgaaacaattaatagaggtctgtgttctaacaatgtgttcttctatcctgtaataaacgacctgtgcaaagaaggaaaggtgaaggaggcacaggatatgtttgacttcattgtaggtattggtcagcggcccgatgtgattatgtacaattcactgatggatggatattgccttgttggcaaggtggaggaagcactgagagtacttgatgctatgaagtctgctggcctccaacctgatgctattacgtatgctatacttcttaatggctactgtaaaattggcaggatcgccgatggattgagtcttttcagggaaatgtcactcagcggggttaagcccacgactattatgtacagcattatacttgatgggctgtttcgctccgggagaacagtttctgcaaaggaaaaattcaatacgatggttgaaagtggcttaccagtggacgttcgcacatacaacatagttcttcatggactttgtagaaacaattgcactggtgaagcaatagagttgttcaaaaaattatgtgcaacgaacgtgaagattaatgtcataacattcaataccatgatttctgcaatgtttaaaactaggagaattggagaagccaaggatttgtttgctactatatcagccatcgggttggtgccttctgttgtgacttacagtgtaatgacgacgaatttcataaaagaagggttgctggcggaggctgatgatatgtttttagcaatggagaaggctggctgtgctcccaactccaggctgctaaatcacgtggtcagagtgttgctggagaatggtgcagttgtaaaggctgcaacttatctcgctaaacttgatgcaaaacagctttcacttgaagcttcgacagtttcgttaattgtatctctcttctcaaggaaagggaaattaagggagcatgtaaagttgcttccggtaaagtaccagcctcctgagatgttggac

SEQ ID NO: 1715 - DNA, 2007 bp, Triticum aestivum
  misc_feature (82)..(82): n is a, c, g, or t
atgcatcaaggcgttggatgcactgacccgagcggacggggacaaaatccacgcccgtcggcaacctctcacccctccctcnccgttcacagtctagattcgtcagccgcctcccaggccgctcgccggcggccaggaccaccggagttcctgagtctcctttctctccgacggaggcacgcctcctcttcatcgccactgttgagggcatcggttgcaaccccgcggcggcggcgagcggttcccccgagtgcttggttagtgccgagcatcgcgggtgacgccactagagcgcggtgcggcggcgcacgcacggtcagccttcccggagggcaagacccgcggcagttgcgcgccgagctccgctggagacggccagcaatgccgaccggccggctgtcctccatcttcaccagcaatgcaacctcctccttcagggctccttcgccacagccacgagcccccctcgccgccttggctgccgccacggagcgcgtccgcgccggaacgctaagtcggcaggacgcgcaccacctgttcgacgaattgctgagccaagccgcgacagtcccagtacgcacgctcaacaattttcttgccgccctcgcccgtgctccgccctcagctgcctgtggcgatggccctgcccttgccatcgccctcttcaaccgcatgtcccaaggcgctggtgcacgggtggtgtcgcccacgctctgtacctattccatcctcatggactgctgctgccgcgcaggccgcccggacttggtggttgccttcttcggccgcctcatcaggttggggctgcgcttgaatgtcatccccttcaacaacctcctcaaggggctttgcaaggccaagcgctcaaatgaggcattggatctgctgctccaccggatgcccgaactggactgtgcgcctgatgtcttctcgtacagcatagtaatcaacggctgttttaaagaaggtgaagtagacaaagcgtgcaatctcttccatgggatgatccaactgggagttcaacctaatgtggtcatctacacctcaattatcgatgcactaagcaagtgcggagccatggacaaggcagaagtggtctttcggcaaatggttgataaaggtattggacccgatgtcatgacatgcactagtctgatccatggatattccatttcgggtaggtggaaggcggcagtaagggtattcaaagagatgataagtcttggtgttgtaccagataccgtcatgtggaactcatttgtggattcactttgcaagcatagaaggacaaaggaagctagagttatttttgactccatggctgcaaagggccagaaacctgatactgtctcctactctattatgcttaacgggtatgtgaaagaaggatgctttgatgatatgaccggtctcttcaattcgatgctacagaacggtgttgtacctaaccaccatattttcaacatactgatcaatgcatatgctaaacgtggactgatggatgaggctatgcacatgttcgaagtaatgaggcaacaaggagtaaacccagatgtagttgactatctagtagtaatggattcactttgcaaaatgggtaggatggatgctgctctggacaaatttaatcagatggtcaatcaaggagtttcacctaacaaagctgtttaccaatgcctggttctgggttcttgctctcatggtgattttgtgaaagccaaggaattgatttctgaagcacttaatagaggtctctgttctaacagtgtgttcttctatcctgtaataaacgacctgtgcaaagaaggaaaggtgaaggaggcacaggatatgtttgacttcattgtaggtattggtcagcggcccgatgtgattatgtacaattcactgatggatggatattgccttgttggcaaggtggaggaagcactgagagtacttgatgctatgaagtctgctggcctccaacctgatgctattatgtatggtatacttcttaatgatcac

SEQ ID NO: 1716 - DNA, 2217 bp, Triticum aestivum
atgccctctgaggcctgcagagacggccccttcctcgccctcaccctcttcaaccgtgtctgccgagaagaagccggcatgcgggttgcgccgccaaccatcttcacctacggcatcctcatgaactgctgctgccgtatgggtcgtccggacctagggctcgcctactttgggcgcatcctcagggcgggcctgaaggcaaaccagatcgccgccaacaccgtcatcaagtgcctctgctgcgcaaaacatagtgacgaggctgtcaatatgctgcttcataggatgtccgacctcggctgtgtgcctgatgccttctcatacaacaccgttctgaagagcttgtgtgaagatggcaggagcttgcaggcgctcgacctactgctccagatggcgtcgaaggaaggaggtgcctgctcccccgacatggtggcatatagcacggtcatccacggcttcttgaaggaaggcaaagtagacaaggcatgcaatctgttcgatgaaatgatgcggcaaggggttgtgcctgatgtggtgacgtatagctcgattatcgatgcattgtgcaaagctggagcaatgtacaaggcagagttgttcctttggcagatggttgatgatggtgttcgaccggatgaggtgacatatactagcatgatccatggatattccactttgggccggtggaaacaggtgcgtaaaatgttcagagaaatgacaagccgtggtcttataccagatactgtcacttggaactcgttcatggactccctctgcaagcatggaagaaccaaagaagctgcagaagttttcttttccatggctggaaagggcagcaagcctaatattgtctcctacactattcttcttcatgggtatgccaatgaaggaagctttgctgatatgatgagtctcttcaattcaatgaaaggcggcggcattgtagccaactgcaaagttttcaacatattaattggtgcatatgctaaacgagggctgatagatgaagctatgcttatacttactgaaatgcggggacaaggactgagtccggatgtagtcacctattcaactctaatatctgcacattggagaatgggtaagctgactgatgccatggataagttcagtcagatggttgttggtacgggagtacagccggacacagttgtttatcactccctagttcagttcttatgtacacatggtgatttggtgaaagcgaaggagttgatttctgaaatgatgaataaaagtattgctcgtccaaacactgcactcttcagttcaataatggacagtctatgcaatgaaggaagggttatagatgcacaccatatctttgacttggttatagacataggtgagaaacctgatatcagtatgtttagtacgctgattgacggatattgcttagtcggcgagatggacaaagcatgtggagtacttgatgccatggtatcagctggcattgagcctaatgtcattacgtatagcacacttgtcagtagatattgtaaacgtggaaggatcgatgatgggttgattctgttcagacaaatgttgcataagaaagttaaacctacaactgttacatatgaaaccacactgaatggattatttcgtgctgggagaactgctgatgcgaagaaaatcttcgatgagatgatcgaaagtggaataatggtgagcatttctacatataatataattcttggaggactttgtagaaataattgcgcagatgaagcgatcatcctattccagaaattacgtgcaatgaatgtgaagttcaatatcacaacactcaataccatcattgatgcattgtacaaggttgaaagaagagaagaagctaatgatttatttgctgcattaccagccagcgggttggtgcctaatgcttccacttacggagtaatggtacaaaatcttctaaaagaaggagcagtggaggaagctgacagtatgttctcatcaatggagaagagtggttgtgctcctagctctcgtcttgtaaatgatgtcatcagaactttattggaaaagggggagatagtcaaggccggaaaatatatgtctaaagttgatgagaagagcatctcacttgaagcttcaactagttcgttgttgttgtctctcttttcagggaatgggaaatatcgggaacaactacaattgctccctgcaaagtaccaatttttcgatggaatcagt

SEQ ID NO: 1717 - DNA, 2475 bp, Triticum aestivum
atgtcccgcctccgcctccgccactgctcctgcttcaccacgcccatgtcccgcatccgcctccgccgccgcctctcctcttccacctcacgacccacaccctcccggtctccccgcgccgcctttgcggcggccacggagcgtgtccgcgccggaacgctcagcccgcaagacgcacaccacctgttcgacgaattgtttcagcaggccaccccggtccccgagcgccccctcaacggattccttgccgccctcacccgtgccacgccctccgaagcctgcagagacggccccgctctcgccctctccctcttcaaccgtgtctgccgagaagaagccggcatgcgggtggcgccgcccaccatcttcacgtacggcgtcctcatgaactgctgctgccgcatgcgtcgtccggaacttgggctcgccttcttcggccgcctcctaaggacgggcctgaaggcagacaagatcgtcgccaacactgtcctcaagtgcctgtgctgcgctaaacgggcagacgacgctgtgaaagtgctgcttcataggatgaccgagctggggtgtgtgcctgatgccttctcatacgccattgtcctgaagagcttatgtgatgataacaggagccaacaggcgctctacctgctccggatgatggcgaaagaagaaggtgtgtgctcccctgacgtggtcacatataacaccgtcatccatggcttctttaaggaaggaaaaataggcaaggcctgcaatctattccatgaaatgacgaagcaagggtttgtgcctaatgtggtgacatataactcggttatcaatgcattgtgcaaggcccgagcaatggacaatgcagagttgttccttcggcagatggttgataacggcgttcaaccgaataaagtgacatatactagcatgatccatggatattccactttgggccagtggaaagaggcgactaaactgttcagagaaatgacaagcagtggtcttataccagatattgtcacttggaactcgttcattgactccctttgcaagcatggaagaagcaaagaagctgcagaaatttttcattccatgtctgcaaagggccacaagcctgatatcatctcctacaccactcttcttcatgggtatgccaatgaaggaagctttcctgatatgatgagtctctttaagtcaatggaaggcgacggtattgtagccaactgccaatttttcaacatattaattgatgcatatgctaaacgaggaatgatggacgaagctatgctcatatttactgaaatgccaggacaaggagtcaatccaaatgtagtcacctattcaactgtggtagcttcactttgcagaatgggtaggctggctgatgcaatgaataagttcagtgagatgattggtacgggagtacaaccgaacacagttgtttatcactccctagttcagggcttatgtacacatggtgatttggtgaaagcgaaggagttgatttctgaaatgatgaataaaggtattcctcgtccaaacattgcattcttcagttcaatagtacacagtctatgcaaagaaggaagggttatggatgcacaccatatctttgacttggttaaagacataggggagagatctgacatcattatgtttaatacgctgattgatggatattgcctagttggtgagatgggcaaagcagtcagtgtactagatgtcatgatatcagccggcattgagcctgatatctttacatataatacacttgtcaatggttattttaagagtggaaggatcgatgatgggttgaatctgttcagagaaatgtcacataagaaaattaaacctacaactgttacatataacatcatactggatggattatttcgtgctgggagaaccgttgctgccaagaaaatgctccatgagttgatcggatgtggaacaacagtgagcttgtccacatacaacataattcttaaaggactttgtagaaataattgcaccgacgaagcaatcgtcatgttccagaaattacacacaattaatgtaaagttcaatatcacaacactcaataccatgattaattcaatgtacactgttcagagaagagaagaagctaaaaatttgtttgctgcaatatcagacagcgggttggtgcccaatgcctctacatacggcataatgatacgaaatcttctaaaagaaggatcagtggaagaagctgacagtatgttcttatcaatggagaggagtggttgtgctccttgctctcgtcttttaaatgatactattagaacgttattggagaagggggagatagtcaaggccggaaattatatgtctaaagttgatggcaagagcatctcacttgaagcttcaacttgttcattgttgttgtctctgttttctgggaaaggtaaatatcgtgaacaaatacaattgctccctgtaaaataccaattcttcggtggagttagt

SEQ ID NO: 1718 - DNA, 2475 bp, Triticum aestivum
atgtcccgcccccgcctccgccactgctcctgcttcaccacgcccatgtcccgcatccgcttccgccgccgcctctcctcttccacctcacgacccacaccctcctggtctccccgcgccgcctttgcggcggccacggagcgcgtccgcgacggaacgctcagcccgcaagacgcacaccacctgttcgacgaattgtttcagcaggccaccccggtccccgaccgccccctcaacggattccttgccgccctcacccgtgccacgccctccgaggcctgcagagacggccctgctctcgccctctccctcttcaaccgtgtctaccgagaagaagccggcatgcgggtggcgccgccgaccatcttcacctacggcgtcctcatgaactgctgctgccgcatgcgtcgtccggaacttgggctcgccttcttcggccgcctcctaaggacgggcctgaaggaagacaagatcgtcgccaacactgtcctcaagtgcctgtgctgcgctaaacgggcagacgacgctgtgaaagtgctgcttcatacgatgaccgagctggggtgtgtgcctgatgccttctcatacgccattgtcctgaagagcttatgtgatgataacaggagccagcaggcgctctacctgctccggatgatggcgaaagaagaaggtgtgtgctcccctgacgtggtcacatataacaccgtcattcatggcttctttaaggaaggaaaaataggcaaggcctgcaatctattccatgaaatgacgaagcaagggtttgtgcctaatgtggtgacatataactcggttatcaatgcattgtgcaaggcccgagcaatggacaatgcagagttgttccttcggcagatggttgataacggcgttcaaccgaataaagtgacatatactagcatgatccatggatattccactttgggccagtggaaagaggcgactaaactgttcagagaaatgacaagcagtggtcttataccagatattgtcacttggaactcgttcattgactccctttgcaagcatggaaggagcaaagaagctgcagaaatttttcattccatgtctgcaaagggccacaagcctgatatcatctcctacaccactcttcttcatgggtatgccaatgaaggaagctttcctgatatgatgagtctctttaagtcaatggaaggcgacggtactgtagccaactgccaatttttcaacatattaattgatgcatatgctaaacgaggaatgatggacgaagctatgctcatatttactgaaatgccaggacaaggagtcaatccaaatgtagtcacctattcaactgtgatagcttcactttgcagaatgggtaggctggctgatgcaatgaataagttcagtgagatgattggtacgggagtacaaccgaacacagttgtttatcactccctagttcagggcttatgtacacatggtgatttggtgaaagcgaaggagttgatttctgaaatgatgaataaaggtattcctcgtccaaacattgcattcttcagttcaatagtacacagtctatgcaaagaaggaagggttatggatgcacaccatatctttgacttggttaaagacataggggagagatctgacatcattatgtttaatacgctgattgatggatattgcctagtcggtgagatgggcaaagcagtcagtgtactagatgtcatgatatcagccggcattgagcctgatatctttacatataatacacttgtcaatggttattttaagagtggaaggatcgatgatgggttgaatctgttcagagaaatgtcacataagaaaattaaacctacaactgttacatataacatcatactggatggattatttcgtgctgggagaaccgttgctgccaagaaaatgctccatgagttgatcggatgtggaacaacagtgagcttgtccacatacaacataattcttaaaggactttgtagaaataattgcaccgacgaagcaatcgtcatgttccagaaattacacacaattaatgtaaagttcaatatcacaacactcaataccatgattaattcaatgtacactgttcagagaagagaagaagctaaagatttgtttgctgcaatatcagacagcgggttggtgcccaatgcctctacatacggcataatgatacgaaatcttctaaaagaaggatcagtggaagaagctgacagtatgttcttatcaatggagaggagtggttgtgctccttgctctcgtcttttaaatgatactattagaacgttattggagaagggggagatagtcaaggccggaaattatatgtctaaagttgatggcaagagcatctcacttgaagcttcaacttgttcattgttgttgtctctgttttctgggaaaggtaaatatcgtgaacaaatacaattgctccctgtaaaataccaattcttcggtggagttagt

SEQ ID NO: 1719 - DNA, 2475 bp, Triticum aestivum; identical to SEQ ID NO: 1718

SEQ ID NO: 1720 - DNA, 2475 bp, Triticum aestivum; identical to SEQ ID NO: 1718

SEQ ID NO: 1721 - DNA, 2475 bp, Triticum aestivum; identical to SEQ ID NO: 1718

SEQ ID NO: 1722 - DNA, 2475 bp, Triticum aestivum; identical to SEQ ID NO: 1718

SEQ ID NO: 1723 - DNA, 2475 bp, Triticum aestivum; identical to SEQ ID NO: 1718

SEQ ID NO: 1724 - DNA, 2091 bp, Triticum aestivum
atgaactgctgccgccgcacgcgtcgtccggaacttgggctcgccttctttgggcgcgtcctcaggatgggcctgaggacaaacgtggtcgtcgccaccacggtcctccagtgcctctgcggcgccaaacggacagatgaggccgtggacatcctgctacatcggatgtccgagctcgggtgcgtgcctgatgccttctcatactccattgttctgaagagcttatgcgatgatggcaggagccagcgggcactcgacctgctccacatgtgggagaaagaacgaggtctctgctcccccaacgtagtgatgtataacacggtcatccacggcttctttaaggaaggtgaagtaagcaaggcatgcattctattccatgaaatggagcagaaaggggttgtgcctaatgtggtgacatatagcttgaccattgacgcgctgtgcaaggccagagctatggacaaagcacagttgttcctccggcagatgattgataaaggtgttcgaccgaacaatgtgacatataatgtcatgatccatggatattgcactctgggacagtggaaggaagcgcgtaaaatgttcagagaaatgacaagacagggtctcataccagatattgttacttggacctcgttcatggcctctctctgtaagcatggaagaaccaaagaagctgccgaattctttgattccatgactgccaagggccacaagcctgatttggtcatgtatcatgttctgctccatgggtatgcaaccaaaggatgctttgctgatatgattaatctctttaattcaatggcaaccaagggtattgtacccgatcgtcaggttttcaacattttaattgatgcacatgctaaacatggaatgatggatgaagctatgcacatatttactggaatgcagggacaaggagtgtgtccagatgtatggacctattcaactctaatatctgcactttgcagaatgggtaggctggctgatgccatggataacttcagtcagatgattggtaagggagtacaaccgaacacagttgtttatcactccctaattcagggtttctctacacatggtgatttgaggaaagcaaaggagttggtttatgaaatgacaaacaaaggtattccttgtccaaacattgcattcttcagttctgtaatggacagtatatgcaaagaaggaagggttatggatgcacatgatatcttccacttggttacagacataggtctgaaacctaacatcattacgtttaatacgctgattgatggacattgcttagccggtgagatggagaaagcatttggagtacttgattccatggtatcagctggcatcgaggctgatgtttttacatataatacacttgcttatggctattgtagatgtggaaggattgatgatgggttgattctattcagagaaatgttgcaaaacaaacctaaacccacaacaatcacatataacatcatactggatgggttatttcgtgctgggagaacatttgctgcaaagaaaatgttcgttgagatgattgaaacgggaataacagtgagcatttccacatacagtataatacttggaggactttgtaggaataattgctctgacgaagcgatcaccctatttcagaaattaggaacaatgaatgtgaagtttgatattaaaatactcaataccatgatcaatgccatgttcaaggttcggagaagagaagaaactaacggtttgtttgctgcaatatcagccagtgggatggtacctaatgcttctacctacagcgtaatgataggaaatcttctaaaagaaggatcagtggaagaagctgaaaatatgttctcattaatggagaagagtggttgtgctccagactctcgtcttataaataatatcatcagaatattgttggaaaacggtgacatcgtcaaggctggaaattatatgtctaaagttgatggcaagagcatctcacttgaagcttcaactacttcgttgttgatgtgtctcttttcaagtaaagggaaatatcgggaacaaatcagtttgctccctgtaaattaccaatttttcaatggagtcggt

SEQ ID NO: 1725 - DNA, 2472 bp, Triticum aestivum
atgtcccgcctccgccactccacctccaccgcgccgatgccccacctccgccttctccgctgccgctcctcctccatctccaccttgccgccgtcacgctcatggtctcccgtcaccgcctttgccgcggccacagagcgcgtcagcgctgggacgctcagtccggaagacgcacaccgcctgttcgacgaattgcttcggcaggccactccggtccccgcgcgctccctgaacggcttcctcacggccctctcccgtgcgccgggcaccggcgcctgcggagacggccccgccctcgccctcgccctcttcaaccgcacccgccgagaagaggccggctcccgggtggtgccgtccacaatcttcacctacggcatcctcatgaactgctgccgccgcacgcgtcgtccggaacttgggctcgccttctttgggcgcgtcctcaggatgggcctgaggacaaacgtggtcgtcgccaccacggtcctccagtgcctctgcggcgccaaacggacagatgaggccgtggacatcctgctacatcggatgtccgagctcgggtgcgtgcctgatgccttctcatactccattgttctgaagagcttatgcgatgatggcaggagccagcgggcactcgacctgctccacatgtgggagaaagaacgaggtctctgctcccccaacgtagtgatgtataacacggtcatccacgacttctttaaggaaggtgaagtaagcaaggcatgcagtctattccatgaaatggagcagaaaggggttgtgcctaatgtggtgacatatagcttgaccattgacgcgctgtgcaaggccagagctatggacaaagcacagttgttcctccggcagatgattgataaaggtgttcgaccgaacaatgtgacatataatgtcatgatccatggatattgcactctgggacagtggaaggaagcacgtaaaatgttcagagaaatgacaagacagggtctcataccagatattgttacttggacctcgttcatggcctctctttgtaagcatggaagaaccaaagaagctgccgaattctttgattccatgactgccaagggccacaagcctgatttggtcatgtatcatgttctgctccatgggtatgcaaccaaaggatgctttgctgatatgattaatctctttaattcaatggcaaccaagggtattgtacccgatcgtcaggttttcaacattttaattgatgcacatgctaaacatggaatgatggatgaagctatgcacatatttactggaatgcagggacaaggagtgtgtccagatgtatggacctattcaactctaatatctgcactttgcagaatgggtaggctggctgatgccatggataacttcagtcagatgattggtaagggagtacaaccgaacacagttgtttatcactccctaattcagggtttctctacacatggtgatttgaggaaagcaaaggagttggtttatgaaatgacaaacaaaggtattccttgtccaaacattgcattcttcagttctgtaatggacggtatatgcaaagaaggaagggttatggatgcacatgatatcttccacttggttacagacataggtctgaaacctaacatcattacgtttaatacgctgattgatggacattgcttagtcggtgagatggagaaagcatttggagtacttgattccatggtatcagctggcattgaggctgatgtttttacatataatacacttgcttatggctattgtagatgtggaaggattgatgatgggttgattctattcagagaaatgttgcaaaacaaacctaaacccacaacaatcacatataacatcatactggatgggttatttcgtgctgggagaacatttgctgcaaagaaaatgttcgttgagatgatcgaaacgggaataacagtgagcatttccacatacagtataatacttggaggactttgtaggaataattgctctgacgaagcgatcaccctatttcagaaattaggagcaatgaatgtgaagtttgatattaaaatactcaataccatgatcaatgccatgttcaaggttcggagaagagaagaagctaacggtttgtttgctgcaatatcagccagtgggatggtacctaatacttctacctacagcgtaatgataggaaatcttctaaaagaaggatcagtggaagaagctgaaaatatgttctcattaatggagaagagtggttgtgctccagactctcgtcttataaataatatcatcagaatattgttggaaaacggtgacatcgtcaaggctggaaattatatgtctaaagttgatggcaagagcatctcacttgaagcttcaactacttcgttgttgatgtgtctcttttcaagtaaagggaaatatcgggaacaaatcagtttgctccctgtaaattaccaatttttcaatggagtcggt

SEQ ID NO: 1726 - DNA, 2472 bp, Triticum aestivum
atgtcccgcctccgccactccacctccaccgcgccgatgccccacctccgccttctccgctgccgctcctcctccatctccaccttgccgccgtcacgctcatggtctcccgtcaccgcctttgccgcggccacagagcgcgtcagcgctgggacgctcagtccggaagacgcacaccgcctgttcgacgaattgcttcggcaggccactccggtccccgcgcgctccctgaacggcttcctcacggccctctcccgtgcgccgggcaccggcgcctgcggagacggccccgccctcgccctcgccctcttcaaccgcacccgccgagaagaggccggctcccgggtggtgccgtccacaatcttcacctacggcatcctcatgaactgctgccgccgcacgcgtcgtccggaacttgggctcgccttctttgggcgcgtcctcaggatgggcctgaggacaaacgtggtcgtcgccaccacggtcctccagtgcctctgcggcgccaaacggacagatgaggccgtggacatcctgctacatcggatgtccgagctcgggtgcgtgcctgatgccttctcatactccattgttctgaagagcttatgcgatgatggcaggagccagcgggcactcgacctgctccacatgtgggagaaagaacgaggtctctgctcccccaacgtagtgatgtataacacggtcatccatgacttctttaaggaaggtgaagtaagcaaggcatgcagtctattccatgaaatggagcagaaaggggttgtgcctaatgtggtgacatatagcttgaccattgacgcgctgtgcaaggccagagctatggacaaagcacagttgttcctccggcagatgattgataaaggtgttcgaccgaacaatgtgacatataatgtcatgatccatggatattgcactctgggacagtggaaggaagcgcgtaaaatgttcagagaaatgacaagacagggtctcataccagatattgttacttggacctcgttcatggcctctctttgtaagcatggaagaaccaaagaagctgccgaattctttgattccatgactgccaagggccacaagcctgatttggtcatgtatcatgttctgctccatgggtatgcaaccaaaggatgctttgctgatatgattaatctctttaattcaatggcaaccaagggtattgtacccgatcgtcaggttttcaacattttaattgatgcacatgctaaacatggaatgatggatgaagctatgcacatatttactggaatgcagggacaaggagtgtgtccagatgtatggacctattcaactctaatatctgcactttgcagaatgggtaggctggctgatgccatggataacttcagtcagatgattggtaagggagtacaaccgaacacagttgtttatcactccctaattcagggtttctctacacatggtgatttgaggaaagcaaaggagttggtttatgaaatgacaaacaaaggtattccttgtccaaacattgcattcttcagttctgtaatggacggtatatgcaaagaaggaagggttatggatgcacatgatatcttccacttggttacagacataggtctgaaacctaacatcattacgtttaatacgctgattgatggacattgcttagtcggtgagatggagaaagcatttggagtacttgattccatggtatcagctggcattgaggctgatgtttttacatataatacacttgcttatggctattgtagatgtggaaggattgatgatgggttgattctattcagagaaatgttgcaaaacaaacctaaacccacaacaatcacatataacatcatactggatgggttatttcgtgctgggagaacatttgctgcaaagaaaatgttcgttgagatgatcgaaacgggaataacagtgagcatttccacatacagtataatacttggaggactttgtaggaataattgctctgacgaagcgatcaccctatttcagaaattaggagcaatgaatgtgaagtttgatattaaaatactcaataccatgatcaatgccatgttcaaggttcggagaagagaagaagctaacggtttgtttgctgcaatatcagccagtgggatggtacctaatacttctacctacagcgtaatgataggaaatcttctaaaagaaggatcagtggaagaagctgaaaatatgttctcattaatggagaagagtggttgtgctccagactctcgtcttataaataatatcatcagaatattgttggaaaacggtgacatcgtcaaggctggaaattatatgtctaaagttgatggcaagagcatctcacttgaagcttcaactacttcgttgttgatgtgtctcttttcaagtaaagggaaatatcgggaacaaatcagtttgctccctgtaaattaccaatttttcaatggagtcggt

SEQ ID NO: 1727 - DNA, 2472 bp, Triticum aestivum; identical to SEQ ID NO: 1726

SEQ ID NO: 1728 - DNA, 2508 bp, Triticum aestivum
atgtcccgcctccgccactccacctccaccgcgccgatgtcccgcctccgccactccacctccaccgcgccgatgccccacctccgccttctccgctgccgctcctcctccatctccaccttgccgccgtcacgctcatggtctcccgtcaccgcctttgccgcggccacagagcgcgtcagcgctgggacgctcagtccggaagacgcacaccgcctgttcgacgaattgcttcggcaggccactccggtccccgcgcgctccctgaacggcttcctcacggccctctcccgtgcgccgggcaccggcgcctgcggagacggccccgccctcgccctcgccctcttcaaccgcacccgccgagaagaggccggctcccgggtggtgccgtccacaatcttcacctacggcatcctcatgaactgctgccgccgcacgcgtcgtccggaacttgggctcgccttctttgggcgcgtcctcaggatgggcctgaggacaaacgtggtcgtcgccaccacggtcctccagtgcctctgcggcgccaaacggacagatgaggccgtggacatcctgctacatcggatgtccgagctcgggtgcgtgcctgatgccttctcatactccattgttctgaagagcttatgcgatgatggcaggagccagcgggcactcgacctgctccacatgtgggagaaagaacgaggtctctgctcccccaacgtagtgatgtataacacggtcatccacgacttctttaaggaaggtgaagtaagcaaggcatgcagtctattccatgaaatggagcagaaaggggttgtgcctaatgtggtgacatatagcttgaccattgacgcgctgtgcaaggccagagctatggacaaagcacagttgttcctccggcagatgattgataaaggtgttcgaccgaacaatgtgacatataatgtcatgatccatggatattgcactctgggacagtggaaggaagcacgtaaaatgttcagagaaatgacaagacagggtctcataccagatattgttacttggacctcgttcatggcctctctttgtaagcatggaagaaccaaagaagctgccgaattctttgattccatgactgccaagggccacaagcctgatttggtcatgtatcatgttctgctccatgggtatgcaaccaaaggatgctttgctgatatgattaatctctttaattcaatggcaaccaagggtattgtacccgatcgtcaggttttcaacattttaattgatgcacatgctaaacatggaatgatggatgaagctatgcacatatttactggaatgcagggacaaggagtgtgtccagatgtatggacctattcaactctaatatctgcactttgcagaatgggtaggctggctgatgccatggataacttcagtcagatgattggtaagggagtacaaccgaacacagttgtttatcactccctaattcagggtttctctacacatggtgatttgaggaaagcaaaggagttggtttatgaaatgacaaacaaaggtattccttgtccaaacattgcattcttcagttctgtaatggacggtatatgcaaagaaggaagggttatggatgcacatgatatcttccacttggttacagacataggtctgaaacctaacatcattacgtttaatacgctgattgatggacattgcttagtcggtgagatggagaaagcatttggagtacttgattccatggtatcagctggcattgaggctgatgtttttacatataatacacttgcttatggctattgtagatgtggaaggattgatgatgggttgattctattcagagaaatgttgcaaaacaaacctaaacccacaacaatcacatataacatcatactggatgggttatttcgtgctgggagaacatttgctgcaaagaaaatgttcgttgagatgatcgaaacgggaataacagtgagcatttccacatacagtataatacttggaggactttgtaggaataattgctctgacgaagcgatcaccctatttcagaaattaggagcaatgaatgtgaagtttgatattaaaatactcaataccatgatcaatgccatgttcaaggttcggagaagagaagaagctaacggtttgtttgctgcaatatcagccagtgggatggtacctaatacttctacctacagcgtaatgataggaaatcttctaaaagaaggatcagtggaagaagctgaaaatatgttctcattaatggagaagagtggttgtgctccagactctcgtcttataaataatatcatcagaatattgttggaaaacggtgacatcgtcaaggctggaaattatatgtctaaagttgatggcaagagcatctcacttgaagcttcaactacttcgttgttgatgtgtctcttttcaagtaaagggaaatatcgggaacaaatcagtttgctccctgtaaattaccaatttttcaatggagtcggt

SEQ ID NO: 1729 - DNA, 2472 bp, Triticum aestivum; identical to SEQ ID NO: 1725

SEQ ID NO: 1730 - DNA, 2508 bp, Triticum aestivum
atgtcccgcctccgccactccacctccaccgcgccgatgtcccgcctccgccactccacctccaccgcgccgatgccccacctccgccttctccgctgccgctcctcctccatctccaccttgccgccgtcacgctcatggtctcccgtcaccgcctttgccgcggccacagagcgcgtcagcgctgggacgctcagtccggaagacgcacaccgcctgttcgacgaattgcttcggcaggccactccggtccccgcgcgctccctgaacggcttcctcacggccctctcccgtgcgccgggcaccggcgcctgcggagacggccccgccctcgccctcgccctcttcaaccgcacccgccgagaagaggccggctcccgggtggtgccgtccacaatcttcacctacggcatcctcatgaactgctgccgccgcacgcgtcgtccggaacttgggctcgccttctttgggcgcgtcctcaggatgggcctgaggacaaacgtggtcgtcgccaccacggtcctccagtgcctctgcggcgccaaacggacagatgaggccgtggacatcctgctacatcggatgtccgagctcgggtgcgtgcctgatgccttctcatactccattgttctgaagagcttatgcgatgatggcaggagccagcgggcactcgacctgctccacatgtgggagaaagaacgaggtctctgctcccccaacgtagtgatgtataacacggtcatccacgacttctttaaggaaggtgaagtaagcaaggcatgcagtctattccatgaaatggagcagaaaggggttgtgcctaatgtggtgacatatagcttgaccattgacgcgctgtgcaaggccagagctatggacaaagcacagttgttcctccggcagatgattgataaaggtgttcgaccgaacaatgtgacatataatgtcatgatccatggatattgcactctgggacagtggaaggaagcacgtaaaatgttcagagaaatgacaagacagggtctcataccagatattgttacttggacctcgttcatggcctctctttgtaagcatggaagaaccaaagaagctgccgaattctttgattccatgactgccaagggccacaagcctgatttggtcatgtatcatgttctgctccatgggtatgcaaccaaaggatgctttgctgatatgattaatctctttaattcaatggcaaccaagggtattgtacccgatcgtcaggttttcaacattttaattgatgcacatgctaaacatggaatgatggatgaagctatgcacatatttactggaatgcagggacaaggagtgtgtccagatgtatggacctattcaactctaatatctgcactttgcagaatgggtaggctggctgatgccatggataacttcagtcagatgattggtaagggagtacaaccgaacacagttgtttatcactccctaattcagggtttctctacacatggtgatttgaggaaagcaaaggagttggtttatgaaatgacaaacaaaggtattccttgtccaaacattgcattcttcagttctgtaatggacggtatatgcaaagaaggaagggttatggatgcacatgatatcttccacttggttacagacataggtctgaaacctaacatcattacgtttaatacgctgattgatggacattgcttagtcggtgagatggagaaagcatttggagtacttgattccatggtatcagctggcattgaggctgatgtttttacatataatacacttgcttatggctattgtagatgtggaaggattgatgatgggttgattctattcagagaaatgttgcaaaacaaacctaaacccacaacaatcacatataacatcatactggatgggttatttcgtgctgggagaacatttgctgcaaagaaaatgttcgttgagatgatcgaaacgggaataacagtgagcatttccacatacagtataatacttggaggactttgtaggaataattgctctgacgaagcgatcaccctatttcagaaattaggagcaatgaatgtgaagtttgatattaaaatactcaataccatgatcaatgccatgttcaaggttcggagaagagaagaagctaacggtttgtttgctgcaatatcagccagtgggatggtacctaatgcttctacctacagcgtaatgataggaaatcttctaaaagaaggatcagtggaagaagctgaaaatatgttctcattaatggagaagagtggttgtgctccagactctcgtcttataaataatatcatcagaatattattggaaaacggtgacattgtcaaggctggaaattatatgtctaaagttgatggcaagagcatctcacttgaagcttcaactacttcgttgttgatgtgtctcttttcaagtaaagggaaataccgggaacaaatcagtttgctccctgtaaattaccaatttttcaatggagtcagt

SEQ ID NO: 1731 - DNA, 2364 bp, Triticum aestivum
atgcctggcttctcctccaccgcgtcaatgtcgccactgcgcctccgcctgcacgcccgccactcctcctccgcctcgcaaccctcacgcagccagggatgggatccccacgccgccttcgccgccgccacgcagcgtgcgcgctctggcagcctcaccccggcggacgcacaccacctgttcgacgaattgctgcggcaggcaaatcctgtccaggagcgccccctcaacaaccttctcgccgccatcgcccgcgcgccggcgtccagcgcctgcagagacggccctgcactcgcggttgccctcttcagtcgcatatcccaaggcgcccgccgacgtgtggcacatccaacggcttgcacctacggcatcctcatggactgctgctgccgtgcacgccgccctgatctgtcactcgccttattcggtcgtctcctcaggacgggcctgaaggcagaccaagtcgttttcagcaccctcctcaagggactctgccacgcaaagcgctcagatgaggctctgcatgtgctgctgcacaggatgcctgagctcggctgcacccccgacgtggtggtgtttaacaccgtcatccatggattcttcagggaaggccaagtaggcaaggcgtgcgatatgttccttggaatggcgcagcagggcgttgcgcctaatgtggtgacatataactcggttattgatgcactgtgcaaggccagggccatggacaaggcggagtatttccttcgtcaaatggttgataatggtgtcgtacctgataatgtgacttataatagcctcatccatggatactcctcttcaggccatcaaaaggaggtgcttagggtgctgaaagaaatgacaagtcagggtattataccagatgttgttacttgcaactcgctcatggcctacctttgcaagaacggaagaagcaaagaagctgcagaattttttgactccatggtcatgaagggcctgaaacctaatatcgtctcgtacagtactctgcttcacgggtatgccaccgaagggtgcttagttgatatgattaatctctttaattcaatgacaagagatggtattcaacctgactgtcatgttttgaacatactgattaatgcatatgctaaatctggcatgatggatgaggctatccttatgttcaaagaaatgcagaagcgaggagtgagtccagatgtagtcacctattcaaccgtaatacatggattttgcaaaatgggtaggttggacgatgctatggtaaaatttaagcagatgactgatatgggagtacgaccgaatccaattgtttaccattccctaatcaagggtttttgtacacatggggatttagtgaaagcaaaggaattggttactgaaatgaggaacaaagctatgcgtcctcctgatattaagttcttccattcaataatgcagaacctatgcacggaaggaagggtaatagaagcacgggatatcctcgacttgatggtgcacataggtatgaggcctgatgttttgatatttaatgtactgattggtggatactgcctagtctgcaagatggaggatgcctcgaaaatatttgatgatatggtatcatatggtttagaaccttgtaatattacgtatggtatacttattaatggctattgcaaaaacagaaggattgatgaggggctgattctattcaaagaaatgttgtgcaagggacttaaacctacaacttttaactataacgtcatactggatggattatttctggctggacgaactgttgctgcaaaggagaagtttaatgagatggttgaatctggagtaagtgtgtgcattgatacatgctctatagttcttggtggactttgtaaaaatagctgcagcagcgaagcgatcaccctgttccggaaattaagcacaatgaatgtgaaattagatattaaaattgtcaatatcattattggtgcattctacagggtcaagagaaaccaagaggctaaggatttgtttgctgctataacagccaatggcttggttcctaatgctgttacctacagcataatgatgacaaatcttataaaagaaggttcagtggaagaagccgacaatctttttttatcaatggagaagagcggctctactgcaaactcttggatgttaaataatattatcagaaggttactggaaagaagagagatagtcaaggctggaaattatatgtctaaagttgatgtaaagagctactcacttgaagctaaaactgtttcactgctgatctctctgttttcaagggaagggaaatatagagaccacatcaaattgctccctacaaagtatcagtttctgaaagaaccagccacagttgaa

SEQ ID NO: 1732 - DNA, 2145 bp, Triticum aestivum
atgcctggcttctcctccaccgcgtcaatgtcgccactgcgcctccgcctgcacgcccgccactcctcctccgcctcgcaaccctcacgcagccagggatgggatccccacgccgccttcgccgccgccacgcagcgtgcgcgctctggcagcctcaccccggcggacgcacaccacctgttcgacgaattgctgcggcaggcaaatcctgtccaggagcgccccctcaacaaccttctcgccgccatcgcccgcgcgccggcgtccagcgcctgcagagacggccctgcactcgcggttgccctcttcagtcgcatatcccaaggcgcccgccgacgtgtggcacatccaacggcttgcacctacggcatcctcatggactgctgctgccgtgcacgccgccctgatctgtcactcgccttattcggtcgtctcctcaggacgggcctgaaggcagaccaagtcgttttcagcaccctcctcaagggactctgccacgcaaagcgctcagatgaggctctgcatgtgctgctgcacaggatgcctgagctcggctgcacccccgacgtggtggtgtttaacaccgtcatccatggattctttagggaaggccaagtaggcaaggcgtgcgatatgttccttggaatggcgcagcagggcgttgcgcctaatgtggtgacatataactcggttattgatgcactgtgcaaggccagggccatggacaaggcggagtatttccttcgtcaaatggttgataatggtgtcgtacctgataatgtgacttataatagcctcatccatggatactcctcttcaggccatcaaaaggaggtgcttagggtgctgaaagaaatgacaagtcagggtattataccagatgttgttacttgcaactcgctcatggcctacctttgcaagaacggaagaagcaaagaagctgcagaattttttgactccatggtcatgaagggcctgaaacctaatatcgtctcgtacagtactctgcttcacgggtatgccaccgaagggtgcttagttgatatgattaatctctttaattcaatgacaagagatggtattcaacctgactgtcatgttttgaacatactgattaatgcatatgctaaatctggcatgatggatgaggctatccttatgtttaaagaaatgcagaagcgaggagtgagtccagatgtagtcacctattcaaccgtaatacatggattttgcaaaatgggtaggttggacgatgctatggtaaaatttaagcagatgactgatatgggagtacgaccgaatccaattgtttaccattccctaatcaagggtttttgtacacatggggatttagtgaaagcaaaggaattggttactgaaatgaggaacaaagctatgcgtcctcctgatattaagttcttccattcaataatgcagaacctatgcacggaaggaagggtaatagaagcacgggatatcctcgacttgatggtgcacataggtatgaggcctgatgttttgatatttaatgtactgattggtggatactgcctagtctgcaagatggaggatgcctcgaaaatatttgatgatatggtatcatatggtttagaaccttgtaatattacgtatggtatacttattaatggctattgcaaaaacagaaggattgatgaggggctgattctattcaaagaaatgttgtgcaagggacttaaacctacaacttttaactataacgtcatactggatggattatttctggctggacgaactgttgctgcaaaggagaagtttaatgagatggttgaatctggagtaagtgtgtgcattgatacatgctctatagttcttggtggactttgtaaaaatagctgcagcagcgaagcgatcaccctgttccggaaattaagcacaatgaatgtgaaattagatattaaaattgtcaatatcattattggtgcattctacagggtcaagagaaaccaagaggctaaggatttgtttgctgctataacagccaatggcttggttcctaatgctgttacctacagcataatgcccggtttaaaactgagtagtatacttaaaccgtcaatcgtaaaccggctttcattttgtctttcacagtttgtctttccaaga

SEQ ID NO: 1733 - DNA, 2439 bp, Triticum aestivum
atgtcccgcgtccgcctccacctccaccgccggctcctctcctccacctcaccgccctcacgttcctggtctccccgcgacgcctttgctgcggccgcagagcgcgtgcgtgctggtacactcagtcgagacgatgcacaccacctgttcgacaaattgtttcggcaggccaccccggtccccaaccgctccctgaacggcttccttgcctctctcgcgcgtgctacgtccaccactgcctgcatcaaagatggccccgccctcgcccttgctctcttcaaccgtgtgtgcagagaagaagccggcccgcaggtggccgcgcccaccgtttgcacctacaacatcctcatggactgctgctgccgcgctcgtcgcccagacctagggcttgccttattcgggtgtatcctcaggacgggcttgaagatagagcaaatcaccgccaacaccctcctcaagtgcctctgctatgcaaaacggacgggtgaggctgtgaacgtgctgcttcataggatgtccgagctcggatgtgtgcctgatgtctttgcatacaccacagttcttaagagcttatgtgaaggtagcaagagcctgcaggcgctcgacctgctccggacgatggcaaaagatagaggtggctgcttccctgatgtggtggcatataatacggtcatccatggctttttcaaggagggcgaaacaggcaaggcatgcaatctattccatgaaatgatccatcaaggggttgagcccgatgtggtgacgtacaacttggtcattgatgcgttgtgcaaggctagagcaatggacaaggcagaagtagtccttcagcagatggtcgataaaggtgttcaacctgatacagtgacatatacttacatgatccatggatattccatatctggacggtggaaagagactgctaaattgttcagagaaatgacaagccggggtcttataccaaatattgttacttgcaactcattcctgacctccctttgcaagcatggaagaagcaaagaagctgcagaatttttcgattccatgactgccaagggccacaaaccgaatatcgtctcataccgtattttgcttcatgggtatgctactaaaggatgcttccctgatatgattgatgtctttaattcaatggaaagcaatggtattgcagccgactgccatgttttcaacatattaattgatgcatatgctaaacgtgggatgatggatgaagctatgctgataccaagtaaaatgcaggaacgcagagtgaatcctgatatagtcacctattccagcataatagctggactttccagattgggtaggctgactgaggccatggaaaaattcaatcagatgattgccttgggagtacaaccggacaaagctgtttatcacacgctgattcagggtttttgcatagatggtgatttggctaaagctaagcagttggtttctgaaatgatgaacagaggtattcctcgtcctaacattgtgttcttcaattcagtaataaacagtatgtgcaaggaaggaagggttatggatgcacatgatatctttgagttggttatagacatgggtgagaggcctgataacattttatttaattcactgattgacggatactgcttagtcgggaagatggataaagcattaaaagtacttgatgtcatggaatcagttggtgttgagcctgatgttattacatataatacacttgttaatggctattgtagaaatggaaggatcgttgatggtttgactctgttcagagagatgccgcgtaaaagaattaaacctgacactatttcatatcgcatcataatggatgggttgtttcgttctgggagaactgtttctgcaaggcaaatgttccatgagatgatcgaaagtggaacaacagtcagcatttccacttacaatgtaatacttggaggtctttgtagaaataattgtgcagacgaagcgattgccctgttccagaaattaggttcaatgaatgtgaagttcagtattgcaatcgtcaataccatgattaatgcaatgtataaggttcaaagaaaagaagaagctaaggatttgtttgctgcaatatcagcaagtgggctggtgcataatgaatctacttacgcagtaatgataagaaatcttcttaaagatggagcggtggaagatgctaacgatatgttttcatcaatggacaagagtggtatagtccccagctcccatcttataaatgatatcatcagaatgttgctggaaagaggtgagatcgccaatgctggaaattatttgtctaaagttgatgggaagagcatctcacttgaagcttcaacgacttcattaatgttgtcccttttttcaagagaagggaaatatcgggaggacatgaaattgcttcctgcaaagtatcaatttttcgatggactttgt

SEQ ID NO: 1734 - DNA, 2442 bp, Triticum aestivum
atgtacctcatccacctccacctccaccgccgcctcttctcctccaccgcgcggccctcgcgaccctcgcgtgcctggtctccccacgccgcctttgctgcggccacggagcgcgtccgcgccgggaatttcagctgggaagacgcacacaacctgttcgacgaatcgctacggcgggccaccccggtccccgagcgctccctcgacggcttctgtgccgccctcgcccgtgggcacgcctccgaagcctgcagagatggtcccgccctcgccctcgctctcttcaaccacgtctgccgggacgaatccggcgcgcgggtggcaccacccacaatcttcacgtacggcattctcatgaactgctgctgtcgtgcgcatcgcccggacctagggctagccttcttcggtcgcctcctcaggacgggcctgaaggctgacctgatcgtcgccaacaccctccttaagtgtctctgccgcgcgaaacggacggatgaggctgtgaacgtgctgcttcataggatgtccgagctcggctgtgtgcctgatgccttctcatactccattgttctcaagagcttatgcgacaatggcatgagtcagcaggcgctcgacctgctgcatatgatggcgaaagaaggaggtggctgctcccccgacgtggtggcgtatagcacagtcatccatggcttctttaaggaaggtgaaacaggcaaggcatgcaatctgttccatgaaatgttgcagcaaggtgttgagcccaatgtgtggacatatagttcaatcattgatgcattgtgcaaggccagagcaatggacaaggcagagctagtgcttcagcagatggttaacaaaggtgttcaacccgataatgtgacatataattgcatgatccatggatattccacatctgggcggtggaaagaggctgttaaattgtttagagaaatgaaaagccggggccttataccagataattttacttgcaactccttaatgacttacctttgtaagcatggaagaagcaaagaaggtgcagaattttttgatgccatgactgccaaagggcacagagatgtcatctcctactgtgttttgcttcatgggtatgccaatgaaggatgctttgctgatatgattgatctctttaattcaatggaaagaaacggtattgctgccaactgctatgttttcaacatattagttaatggatatgctaaacgtggaatgacggatgaagctatgctgatatttacagaaatgtgggaaaaaggagtgagtcccaatgtagtcacatattccactgtaatagctgcactttccaggatgggtaggttgactgattctatggacaaatttaatcagatgattgccatgggaattcagccaaacacagctgtttatcactccctaattcagggttgtcttatgcatggtggcttggttaaagctaaggagctgatgtttgaaatgatgaacaaaggtattccttgtcctaacattgttttcttcagttcagtaataaacagtctgtgcaaagaaggaagggttatggatgcacatgatgtctttgacttggctataggcataggtgagaggcctaatgtcattatatttaattcactgattgacggatattgcttagttgggaagatggataaagcattcaaaatacttcatgtcatggaatcagttggtgttgagtctgatgttgttacttatagtgcacttcttgatggctattttaaaaacagaaggattgatggtgctttgactttgtttagagaaatgccgcgcaagagaattaaacctgacactgttacatataacatcatgttggatgggttgtttcgtgctgggagaactgtcgctgcaatggaaatgttccatgagatgactgaaagtggagcaacagtgcgcatttccacatacaatataatacttggaggtctttgtagaaatagttgtgtagatgaagcgattgcactgttccagaaattgcaagcaatgaatgtgaagttcattattgaaatattcaataccatgattgatgcaatgtacaaggttcaaagaaaagaagaagctaaggatttgtttgctgcaataccagctagtgggttggtgcccaatgaatctacttatgcagtaatgataagaaatcttctaaaagacggagcagtggaagatgctgacaatatgttttcatcaatggacaacagtggtatcgttcccagttcccgtcttataaatgatatcatcagaatgttgttggaaaaaggtgagatagccaaggctggaaattatttgtctaaagttgatgggaagagtatctcacttgaagcgtcaactacctcattgatgttgtctctcttttcaaggaaagggaaacatctggaggatattaagttgctcccagcaaactatcaatttttcgatggatttggt

SEQ ID NO: 1735 - DNA, 2442 bp, Triticum aestivum
atgtctctcatccacctccacctccaccgccgcctcttctcctccaccgcgcggccctcgcgaccctcgcgtgcctggtctccccacgccgcctttgctgcggccacggagcgcgtccgcgccgggaatttcagctgggaagacgcacacaacctgttcgacgaattgctacggcgggccaccccggtccccaagcgctccctcgacggcttccttgccgccctcgcccgtgcgcacgcctccgaagcctgcagagatggtcccgccctcgccctcgctctcttcaacctcgtctgccgggatgaatccggcgcgcgggtggcaccgcccacaatcttcacgtacggcattctcatgaactgctgctgtcgtgcgcattgcccggacctagggctagccttcttcgggcgcctcctcaggacgggcctgaaggctgacctgatagtcgccaacaccctccttaagtgtctctgccacgcgaaacggacggatgaggctgtgaacgtgctgcttcataggatgtccaagctcggctgtgtgcctgataccttctcatacaacattgttctcaagagcttatgcgacaatggcatgagccagcaggcgctcgacctgctccatatgatggcgaaagaaggaggtggctgcccccctgacgtggtggcgtatagcacagtcatccatggcttctttaaggaaggtgaaacaggcaaggcatgcaatctgttccatgaaatgatgcatcaaggtgttgagcccaatgtgtggacatatagttcaatcattgatgcattgtgcaaggccagagcaatggacaagacagagctagtgcttcagcagatggttaacaaaggtgttcaacccgataatgtgacatataattgcatgatccatggatattccacatctgggaggtggaaagaggctgttaaattgtttagagaaatgaaaagccggggccttataccagatatttctacttgcaactccttaatgacttacctttgtaagcatggaagaagcaaagaaggtgcagaattttttgatgccatgactgccaaagggcacagagatgtcatctcctactgtattttgcttcatgggtatgccaatgaaggatgctttgctgatatgattgatctctttaattcaatggaaagaaacggtattgctgccaactgctatgttttcaacatattaattaatggatatgctaaatgtggaatgacggatgaagctatgctgatatttacagaaatgtgggaaaaaggagtgagtcccaatgtagtcacatattccactgtaatagctgcactttccaggatgggtaggttgactgattctatggacaaatttaatcagatgattgccatgggaattcagccaaacacagctgtttatcactccctaattcagggttgtcttatgcatggtggcttggttaaagctaaggagctgatgtttgatatgatgaacaaaggtattcctcgtcctaacattgttttcttcagttcagtaataaacagtctgtgcaaagaaggaagggttatggatgcacatgctgtctttgacttggctataggcataggtgagaggcctgatgtcattacatttaattcactgattgacggatattgcttagttgggaagatggatacagcattcaaaatacttgatgtcatggaattagttggtgttgagcctgatgttgttacttatagtgcacttcttgatggctattttaaaaacagaaggattgatgatgctttgactttttttagagaaatgccatgtaagagaattaaacctaacactgttacatatggcatcatgttgggtgggttgtttcgtgctgggagaactgttgctgcaatgaaaatgttccatgagatgattgaaagtggagcaacagtgcgcatttccacatacaatataatacttggaggtctttgtcaaactaattgtgtagacgaagcgattgcactgttccagaaattacgagcaatgaatgtgaagttcaatattgaaacactcaataccatgattaatgcaatgtacaaggttcaaagaaaagaagaagctaaggatttgtttgctgcaataccagctagtgggttggtgcccaatgaatctacttatgcagtaatgataagaaatcttctaaaagacggagcagtggaagatgctgacaatatgttttcatcaatggacaacagtggtatcgttcccagttcccgtcttataaatgatatcatcagaatgttgttggaaaaaggtgagattgctaaggctggaaattatttgtctaaagttgatgggaagagtatctcacttgaagcgtcaactacctcattgatgttgtctctcttttcaaggaaagggaaacatctggaggatattaagttgctcccagcaaagtatcaatttttcgatggatttggt

SEQ ID NO: 1736 - DNA, 2442 bp, Triticum aestivum
atgtctctcatccacctccacctccaccgccgcctcttctcctccaccgcgcggccctcgcgaccctcgcgtgcctggtctccccacgccgcctttgctgcggccacggagcgcgtccgcgccgggaatttcagctgggaagacgcacacaacctgttcgacgaattgctacggcgggccaccccggtccccaagcgctccctcgacggcttccttgccgccctcgcccgtgcgcacgcctccgaagcctgcagagatggtcccgccctcgccctcgctctcttcaacctcgtctgccgggatgaatccggcgcgcgggtggcaccgcccacaatcttctcgtacggcattctcatgaactgctgctgtcgtgcgcattgcccggacctagggctagccttcttcgggcgcctcctcaggacgggcctgaaggctgacctgatagtcgccaacaccctccttaagtgtctctgccacgcgaaacggacggatgaggctgtgaacgtgctgcttcataggatgtccaagctcggctgtgtgcctgataccttctcatacaacattgttctcaagagcttatgcgacaatggcatgagccagcaggcgctcgacctgctccatatgatggcgaaagaaggaggtggctgcccccctgacgtggtggcgtatagcacagtcatccatggcttctttaaggaaggtgaaacaggcaaggcatgcaatctgttccatgaaatgatgcatcaaggtgttgagcccaatgtgtggacatatagttcaatcattgatgcattgtgcaaggccagagcaatggacaagacagagctagtgcttcagcagatggttaacaaaggtgttcaacccgataatgtgacatataattgcatgatccatggatattccacatctgggaggtggaaagaggctgttaaattgtttagagaaatgaaaagccggggccttataccagatatttctacttgcaactccttaatgacttacctttgtaagcatggaagaagcaaagaaggtgcagaattttttgatgccatgactgccaaagggcacagagatgtcatctcctactgtattttgcttcatgggtatgccaatgaaggatgctttgctgatatgattgatctctttaattcaatggaaagaaacggtattgctgccaactgctatgttttcaacatattaattaatggatatgctaaatgtggaatgacggatgaagctatgctgatatttacagaaatgtgggaaaaaggagtgagtcccaatgtagtcacatattccactgtaatagctgcactttccaggatgggtaagttgactgattctatggacaaatttaatcagatgattgccatgggaattcagccaaacacagctgtttatcactccctaattcagggttgtcttatgcatggtggcttggttaaagctaaggagctgatgtttgatatgatgaacaaaggtattcctcgtcctaacattgttttcttcagttcagtaataaacagtctgtgcaaagaaggaagggttatggatgcacatgctgtctttgacttggctataggcataggtgagaggcctgatgtcattacatttaattcactgattgacggatattgcttagttgggaagatggatacagcattcaaaatacttgatgtcatggaatcagttggtgttgagcctgatgttgttacttatagtgcacttcttgatggctattttaaaaacagaaggattgatgatgctttgactttttttagagaaatgccatgtaagagaattaaacctaacactgttacatatggcatcatgttgggtgggttgtttcgtgctgggagaactgttgctgcaatgaaaatgttccatgagatgattgaaagtggagcaacagtgcgcatttccacatacaatataatacttggaggtctttgtcaaactaattgtgtagacgaagcgattgcactgttccagaaattacgagcaatgaatgtgaagttcaatattgaaacactcaataccatgattaatgcaatgtacaaggttcaaagaaaagaagaagctaaggatttgtttgctgcaataccagctagtgggttggtgcccaatgaatctacttatgcagtaatgataagaaatcttctaaaagacggagcagtggaagatgctgacaatatgttttcatcaatggacaacagtggtatcgttcccagttcccgtcttataaatgatatcatcagaatgttgttggaaaaaggtgagatagctaaggctggaaattatttgtctaaagttgatgggaagagtatctcacttgaagcgtcaactacctcattgatgttgtctctcttttcaaggaaagggaaacatctggaggatattaagttgctcccagcaaagtatcaatttttcgatggatttggt

SEQ ID NO: 1737 - DNA, 2442 bp, Triticum aestivum; identical to SEQ ID NO: 1735

SEQ ID NO: 1738 - DNA, 2442 bp, Triticum aestivum; identical to SEQ ID NO: 1735

SEQ ID NO: 1739 - DNA, 2442 bp, Triticum aestivum; identical to SEQ ID NO: 1735

SEQ ID NO: 1740 - DNA, 2442 bp, Triticum aestivum; identical to SEQ ID NO: 1736

SEQ ID NO: 1741 - DNA, 2316 bp, Triticum aestivum
atgccgaccacccgcctgtcctccgtctccgcctcctccttcaaggcttcttcacgaaaaccacgagcccccctcgccgccttggctgctgccacggagcgtgtgcgcgccggaacactaagccaggaggacgcgcaccacctgttcgacaaattgctaggccaagccaccgccgtcccggaacgcgggctgaacaactttcttgccgcactagcccgtgcatcgccctcggctacctgcagcgatggccccggccttgctgtcaccctcttcaaccgcatgtcccttggcgctggtgcacgggtggcgtcgcccacactctgtacctattccatcctcatggactgctgctgccgtgcaggccgcccagacttggtggtcacctttttcggccgcctcctcaggttggggctgcgcttgaatgtcgtctccttcaacaacctcctcaaggggctttgccaggccaagcgctcaaatgaggcattggatctgctgctccaccggatgcccgaactggaccgtgcgcctgatgtcttctcgttcaacatagtaatcaatggctgctttagagaaggtgaagtagacaaagcatgcaatctcttccatgagatgccccaactgggagttcaacctgatgtggtgacctacaactcaattatcatcgcactaagcagggccggagcaatgggtaaggcagaagtggtccttcggcaaatggttgataaaggcattggacccgatgtcatgacatatagcagtctgatccatggatattctacttcgggtcagtggaaggcagcagttagggtattcaaagagatggtaagtgttggtgttcgaccaaatgctgtcacgttgaactcatttatggattcactttgcaagcatagaaggacaaaggaagctagagatatttttgactccatggctgcaaagggccacaaacctaatattgtctcctactctactatgcttaatgggtatgcgaaacaaggatgcttcgatgatatgactggtctcttcaattccatggtacagaacggtattgtacctaacaaccatgttttcaacatactgatcagagcatattctacacgtggactgatggatgaggctatgcacatgttcgaagtaatgaagcaacaaggagtaaacccagatgtagttgactatctagtagtaatagattccctttgcaaaatgggcaggatggatgctgctatggacaaatttaatcagatggtcaatcaaggagtttcacctgatataggcatttaccaatgcctggttctgggttcttgctctaatggtgattttgtgaaagccaaggaattgatttctgaagcagttaatcgaggtctgtgttataacagtgtgttcttctatcctgtaataaacaacctgagcaaagaaggaaatgtaaaggatgcacaggatatgtttgacttcattgtaggtattggtcatcagcctgatgttattatgtacaattcactgatggatggatattgccttgttggcaaggtggaggaagcactgacagtgcttgacgctatgaagtccgctgacctccaacctgatgctattacatatgttatacttcttaatggctactgtaaaattggaaggatcgacgatggattgagtcttttcagggaaatgtcactcagcggggttaagcccacgactattatgtacaacattgcacttgatgggctgtttcgctctaggagaacagtttctgcaaaggaaaaattccatacgattattgaaagtggcataccagtggacgttggcacatacaccatagttcttagtggactttgcaaaaataattgcactgatgaagcaatagagctgttcaacaaattacgtgctatgaacatgaagattaatgtcataatactcaataccatgatttctgcaatgtttaaaactaggagaattgaagaagccaaggatttgtttgctactataccagccattgggttggtgccttctgttgtgacctacactgtaatgatgacgaatttcataaaagaagggttgctggcagaggctgatgatatgtttttagcaatggagaaggctggctgtgctcctgactgcaggctgctaaatcatgtagtcagggtgttgctggaaaaaggtgcagttgtaaaggctgcaacttatcttgctaaacttgatgcgaaagagctgtcacttgaagcttcaacggtttcgttaatagtatctctcttctcaaggagaggcaaattaagggagcacgtaaaattgcttccggtaaagtaccagcctcctgagatgttgggc

SEQ ID NO: 1742 - DNA, 1317 bp, Triticum aestivum
atgattaatctctttaattcaatggaaggcaatggtattgtagctgactgcaatgttttcaacatattaattgatgcatatgctaaatgtggaatgatgcatgaagctatgctcatatttaccaaaatgcgggaacaaggagtgagtccgaatgtatgcacctatgcaactgtaatagctgcactttgcagaatgggtaggctgtctgatgcaatgggcaaattaaatgagatgattgctacgggattacaaccggacgtggctatttatacatccctaattcagggcttctgtacacatggtgatttggggaaagtgaaggagctggtttctgaaatgatgaacaaaggtatgcctcgtccaaacattgtgttcttcagctcagtaataaacagtctatgcaaagaaggaagagttacagatgtacacagtatcttcgacttggctataaacattggtgagaggcctgacgttattacatttacttcactgattgacggatattgtttagttggcaagatggataaagcattcaaagtacttgatgacatggtatcagctggcattgagcctgatgtttatacatatactacccttcttgatggctattctagaaatggaaggattgatgatgggttgacactattcagcgaaatgatgcataaaaaaattaaacctacaactgctacatatggcaccttactaaatgggttgtttcgtgcttggagaactgcttctgcgaagaaaatgatccatgagatgattgaaagtggaacaacagtgagcctttcaatatacgctataattcttgaaggacttcgtagaaataattgcactgatgaagcaatcacgctgttccagaaagtacgtgcaatgaatataaaattggatgttgcaatactcaataccatgatcaatgcaatgtttaaggttcaaagaagagaagaagctaatgatttgtttgcttcaatatcggccagtggattggtacctaatgcttctacctaccgcacaatgataacaaatcttctaaaagaaggattagtggaagaagctgaaaacatgctctcatcaatggagaagagctgttgtgctccggactctcgtcttattaatgataccatcagaatattattggaacaaggtgaggtcgtcaaggctggaaattatatgtctagagttgatggcaagagcatctcacttgaagcttcaactacttcgctgctgatacgtctcttttcaagggaaggaaaatatagggagaaaataaaattgctccctgtaaagtatcaattttttggtggagctacagttgag

SEQ ID NO: 1743 - DNA, 1317 bp, Triticum aestivum; identical to SEQ ID NO: 1742

SEQ ID NO: 1744 - DNA, 2478 bp, Triticum aestivum
atgagaaataaaaaaaaatcacatgaggaggccattttacccgcttccgatttgttacagcaaagactcctcaccattccaccagcgcgaacacgaaggccgtgcccgtcccatgcctcgcctctaccccaccacgcccatgctccgcctcctctcctccgccgccgccgcctctcctcctcctccacctcgtcgccttcacgccgctgggacccccgagccgcctttgccgcggccacggagcgcgtccgcgccgggacgctcagccctgaagacgcacaccacctgttcgacgaattgctactgcaggccaacccggtcccctaccgctccctcaacggcttccttgccgcgctcgcccgtgctccgtcctccgctgctctcagagatggaccctcccttgctctcgccctcttcaaccgcgtctgccgagaagaagcaggaccgcgggtggcgccgcccacagtctgcacctacagcatcctcatggacagctgctgccgtgcatgccgcccgaacctaggccttgctttcttcggccgcttcctcaggacgggcctcaaggcagaccagatcgtcgccagcaacctcctcaagtgcctctgccacgcaaaacggacggatgaggctgtcaacatgctgcttcataggatgtccgagttcggatgtgtgcctaatgtcatctcatactctatagtacttaagagcttatgtgacgatagcaggagccagcaagcgctcgacttgctccagatggtgaggaaagaaggaggtgcctgctccttcaatgtggtggcatatagcacggtcatccacggcttctttaaggaaggggaagtaagcaaggcatgcgatctgttccatgaaatgatgcagcaagggattgtgcctaatgtggtgacatatagctcgattattgatgccttgtgcaaggtcagggcaatggacaaggcaaagctggtccttcagcagatggttgataatggtgttcgaccaaatatgtatacatggaactcattcatgtactccctttgcaagaatggaagaagcaaagaagctgcagaattttttgactccatgacctccaagggcctcaaacctaatatcatcgtgtactctactcttcttcacgggtatgctaccgaaggatgcttagctgatatgattaatctctttaattcaatggaaggcaatggtattgtagctgactgcaatgttttcaacatattaattgatgcatatgctaaatgtggaatgatgcatgaagctatgctcatatttaccaaaatgcgggaacaaggagtgagtccgaatgtatgcacctatgcaactgtaatagctgcactttgcagaatgggtaggctgtctgatgcaatgggcaaattaaataagatgattgctacgggattacaactggacgtggctatttatacatccctaattcagggcttctgtacacatggtgatttggggaaagtgaaggaactggtttctgaaatgatgaacaaaggtatgcctcgtccaaacattgtgttcttcagctcagtaataaacagtctatgcaaacaaggaagagttacagatgcacacagtatcttcgacttggctataaacattggtgagaggcctcacgtcattacatttacttcactgattgacggatattgtttagtttgcaagatggataaagcattcaaagtacttgatgccatggtatcggctggcatcgagcctgatgtttatacatatactacccttcttgatggctattctagaaatggaaggattgatgatgggttgacactattcagtgaaatgatgcataacaaaactaaacctacaactgctacacatggcaccttactaaatgggttgtttcgtgctgggagaactgcttctgcgaagaaaatgatccatgagatgattgaaagtggaacaacagtgagcctttcaatatacgctataattcttgaaggactttgtagaaataattgcgccgatgaagcaatcacgctgttccagaaagtacgtgcaatgaatataaaattggatgttgcaatactcaataccatgatcaatgcaatgtttaaggttcaaagaagagaagaagctaatgatttgtttgcttcaatatcggccagtggattggtacctaatgcttctacctaccgcacaatgataacaaatcttctaaaagaaggattagtggaagaagctgaaaacatgctctcatcaatggagaagagctgttgtgctccggactctcgtcttattaatgatatcatcagaatattattggaacaaggtgaggtcgtcaaggctggaaattatatgtctagagttgatggcaagagcatctcacttgaagcttcaactacttcgctgctgatacgtctcttttcaagggaaggcaaatatagggagaaaataaaattgctccctgtaaagtatcaattttttggtggagctacagttgag

SEQ ID NO: 1745 - DNA, 1317 bp, Triticum aestivum; identical to SEQ ID NO: 1742

SEQ ID NO: 1746 - DNA, 1317 bp, Triticum aestivum
atgattaatctctttaattcaatggaaggcaatggtattgtagctgactgcaatgttttcaacatattaattgatgcatatgctaaatgtggaatgatgcatgaagctatgctcatatttaccaaaatgcgggaacaaggagtgagtctgaatgtatgcacctatgcaactgtaatagctgcactttgcagaatgggtaggctgtctgatgcaatgggcaaattaaatgagatgattgctacgggattacaaccggacgtggctatttatacatccctaattcagggcttctgtacacatggtgatttggggaaagtgaaggagctggtttctgaaatgatgaacaaaggtatgcctcgtccaaacattgtgttcttcagctcagtaataaacagtctatgcaaagaaggaagagttacagatgcacacagtatcttcgacttggctataaacattggtgagaggcctgacgttattacatttacttcactgattgacggatattgtttagttggcaagatggataaagcattcaaagtacttgatgccatggtatcagctggcattgagcctgatgtttatacatatactacccttcttgatggctattctagaaatggaaggattgatgatgggttgacactattcagcgaaatgatgcataaaaaaattaaacctacaactgctacatacggcaccttactaaatgggttgtttcgtgctgggagaactgcttctgcgaagaaaatgatccatgagatgattgaaagtggaacaacagtgagcctttcaatatacgctataattcttgaaggacttcgtagaaataattgcactgatgaagcaatcacgctgttccagaaagtacgtgcaatgaatataaaattggatgttgcaatactcaataccatgatcaatgcaatgtttaaggttcaaagaagagaagaagctaatgatttgtttgcttcaatatcggccagtggattggtacctaatgcttctacctaccgcacaatgataacaaatcttctaaaagaaggattagtggaagaagctgaaaacatgctctcatcaatggagaagagctgttgtgctccggactctcgtcttattaatgatatcatcagaatattattggaacaaggtgaggtcgtcaaggctggaaattatatgtctagagttgatggcaagagcatctcacttgaagcttcaactacttcgctgctgatacgtctcttttcaagggaaggaaaatatagggagaaaataaaattgctccctgtaaagtatcaattttttggtggagctacagttgag

SEQ ID NO: 1747 - DNA, 2478 bp, Triticum aestivum; identical to SEQ ID NO: 1744

SEQ ID NO: 1748 - DNA, 1992 bp, Triticum aestivum
atggacagctgctgccgtgcatgccgcccgaacctaggccttgctttcttcggccgcttcctcaggacgggcctcaaggcagaccagatcgtcgccagcaacctcctcaagtgcctctgccacgcaaaacggacggatgaggctgtcaacatgctgcttcataggatgtccgagttcggatgtgtgcctaatgtcatctcatactctatagtacttaagagcttatgtgacgatagcaggagccagcaagcgctcgacttgctccagatggtgaggaaagaaggaggtgcctgctccttcaatgtggtggcatatagcacggtcatccacggcttctttaaggaaggggaagtaagcaaggcatgcgatctgttccatgaaatgatgcagcaagggattgtgcctaatgtggtgacatatagctcgattattgatgccttgtgcaaggtcagggcaatggacaaggcaaagctggtccttcagcagatggttgataatggtgttcgaccaaatatgtatacatggaactcattcatgtactccctttgcaagaatggaagaagcaaagaagctgcagaattttttgactccatgacctccaagggcctcaaacctaatatcatcgtgtactctactcttcttcacgggtatgctaccgaaggatgcttagctgatatgattaatctctttaattcaatggaaggcaatggtattgtagctgactgcaatgttttcaacatattaattgatgcatatgctaaatgtggaatgatgcatgaagctatgctcatatttaccaaaatgcgggaacaaggagtgagtccgaatgtatgcacctatgcaactgtaatagctgcactttgcagaatgggtaggctgtctgatgcaatgggcaaattaaataagatgattgctacgggattacaaccggacgtggctatttatacatccctaattcagggcttctgtacacatggtgatttggggaaagtgaaggaactggtttctgaaatgatgaacaaaggtatgcctcgtccaaacattgtgttcttcagctcagtaataaacagtctatgcaaagaaggaagagttacagatgcacacagtatcttcgacttggctataaacattggtgagaggcctgacgtcattacatttacttcactgattgacggatattgtttagttggcaagatggataaagcattcaaagtacttgatgccatggtatcggctggcatcgagcctgatgtttatacatatactacccttcttgatggctattctagaaatggaaggattgatgatgggttgacactattcagcgaaatgatgcataacaaaattaaacctacaactgctacacatggcaccttactaaatgggttgtttcgtgctgggagaactgcttctgcgaagaaaatgatccatgagatgattgaaagtggaacaacagtgagcctttcaatatacgctataattcttgaaggactttgtagaaataattgcgccgatgaagcaatcacgctgttccagaaagtacgtgcaatgaatataaaattggatgttgcaatactcaataccatgatcaatgcaatgtttaaggttcaaagaagagaagaagctaatgatttgtttgcttcaatatcggccagtggattggtacctaatgcttctacctaccgcacaatgataacaaatcttctaaaagaaggattagtggaagaagctgaaaacatgctctcatcaatggagaagagctgttgtgctccggactctcgtcttattaatgatatcatcagaatattattggaacaaggtgaggtcgtcaaggctggaaattatatgtctagagttgatggcaagagcatctcacttgaagcttcaactacttcgctgctgatacgtctcttttcaagggaaggcaaatatagggagaaaataaaattgctccctgtaaagtatccattttttggtggagctacagttgag

SEQ ID NO: 1749 - DNA, 1317 bp, Triticum aestivum; identical to SEQ ID NO: 1742

SEQ ID NO: 1750 - DNA, 1317 bp, Triticum aestivum; identical to SEQ ID NO: 1742

SEQ ID NO: 1751 - DNA, 1992 bp, Triticum aestivum; identical to SEQ ID NO: 1748

SEQ ID NO: 1752 - DNA, 1317 bp, Triticum aestivum; identical to SEQ ID NO: 1742

SEQ ID NO: 1753 - DNA, 1992 bp, Triticum aestivum; identical to SEQ ID NO: 1748

SEQ ID NO: 1754 - DNA, 1992 bp, Triticum aestivum; identical to SEQ ID NO: 1748

SEQ ID NO: 1755 - DNA, 2460 bp, Triticum aestivum
atgtcccgcctccgccactccacctccaccgcgccgatgttccacctccgcctcctccgctgccgcttctcctccatctccaccttgccgccgtcacgctcatggtctccccatgcagcctttgccgcggccacagagcgcgtcatcgctgggacgctcagcccggaggacgcacaccgcctgttcgacgaattgctacggcaggccactccggtccccgcgcgctccctgaacggcttcctcacggccctctcccgtgcgccggacaccggcgcctgcagagacggccccgccctcttcaaccgcacccgccgagaagaggccggctcccgggtggtgtcgtccacaatcttcacctacggcatcctcatgaactgctgcggccgcacgcgtcgtccggaacttgggcttgccttctttgggcgcgtcctcaggatgggcctgaagacaaatgtggtcgtcgccaccatggtcctccagtgcctctccagcgccaaacggacagatgaggctgtggacatcctgctacatcggatctccgagctcgggtgcgtgcctgacgccttctcatactccattgttctgaagagcttatgcgatgatagcaggagccagcgggcactcgacctgctccacatgtgggagaaagaacgaggtgtctgctcccccaacgtagtgacgtataacacgggcatccacggcttctttaaggaaggtgaagtaagcaaggcatgcaatctattccatgaaatggtgcagaaaggggttgaacctaatgtggtgacatatagcttgaccattgatgcgctgtgcaaggccagagctatggacaaagcagagttgttcctccggcagatgattgataaaggtgttcaaccgaacaatgtgacatataatgtcatgatccatggatattccactctgggccagtggaaagaagcgggtaaaatgttcagagaaatgacaagacagggtctcataccagatcttgttacttggacctcgttcatggcctctctctgtaagcatggaagaaccaaagaagctgccgaattttttgattccatgactgccaagggccacaagcctgatttggtcacgtaccatgttctgctccatgggcatgcaaccgaaggatgctttgctgatatgattaatctctttaatgcaatggcaaccaaaggtattctacccgaccgtcaggttttcaacattttaattgatgcacatgctaaacatcgaatgatggatgaagctatgcacatatttactggaatgcaggggcaaggagtgtgtccagatgtatggacctattcaactctaatatctgcactttgcagaatgggtaggctggctgatgccatggataacttcagtcagatgattggtaagggagtacaactgaacacagttgtttatcactccctaattcagggtttctctacacatggtgatttgaggaaagcaaaggagttggtttatgaaatgacgaacaaaggtattccttgtccaaacattgcattcttcagttctataatggacagtctatgcaaagaaggaagggttatggatgcacatgatatcttccacttggttacagacataggtctgaaacctaacatcattacgtttaatacgctgattgatggatattgcttagtcggtgagatggagaaagcatttggagtacttgattccatggtatcagctggcattgaggctgatgtttttacatataatacacttgcttatggctattgtagatgtggaaggactgatgatgggttgattctcttcagagaaatggtgcaaaacaaacctaagcccacaacaatcacatataacatcatactggatgggttatttcgtgctgggagaacatttgctgcaaagaaaatgttccttgagatgaccgaaacgggaataacagtgagcatttccacatacagtataatacttggaggactttgtaggaataattgctctgacgaagcgatcaccctatttcagaaattaggagcaatggatgtgaagtttgatattaaaatactcaataccatgatcaatgccatgttcaaggttcggagaagagaagaagctaacggtttgtttgctggaatatcagccagtaggatggtacctaatgcttctacctacagcgtaatgataggaaatcttctaaaagaaggatcagtggaagaagctgaaaatatgttctcattaatggagaagagtggttgtgctccagactctcgtcttataaataatatcatcagaatattattggaaaacggtgacatcgtcaaggctggaaattatatgtctaaagttgatggcaagagcatctcacttgaagcttcaactacttcgttgttgatgtgtctcttttcaagtaaagggaaatatcgggaacaaatcagtttgctccctgtaaattaccaatttttcaatggagtcagt

SEQ ID NO: 1756 - DNA, 2460 bp, Triticum aestivum; identical to SEQ ID NO: 1755

SEQ ID NO: 1757 - DNA, 2472 bp, Triticum aestivum
atgtcccgcctccgccactccacctccaccgtgccgatgttccacctccgcctcctccgctgccgcttctcctccatctccaccttgccgccgtcacgctcatggtctccccatgcagcctttgccgcggccacagagcgcgtcatagctgggacgctcagcccggaggacgcacaccgcctgttcgacgaattgctacggcaggccactccggtccccgcgcgctccctgaacggcttcctcacggccctctctcgtgcgccggacaccggcgcctgcagagacggccccgccctcgccctcgccctcttcaaccgcacccgccgagaagaggccggctcccgggtggtgtcgtccacaatcttcacctacggcatcctcatgaactgctgccgccgcacgcgtcgtccggaacttgggcttgccttctttgggcgcgtcctcagaatgggcctgaagacaaatgtggtcgtcgccaccatggtcctccagtgcctctgcagcgccaaacggacagatgaggctgtggacatcctgctacatcggatgtccgagctcgggtgcgtgcctgacgccttctcatactccattgttctgaagagcttatgcgatgatagcaggagccagcgggcactcgacctgctccacatgtgggagaaagaacgaggtgtctgctcccccaacgtagtgacgtataacacggtcatccacggcttctttaaggaaggtgaagtaagcaaggcatgcaatctattccatgaaatagtgcagaaaggggttgaacctaatgtggtgacatatagcttgaccattgatgcgctgtgcaaggccagagctatggacaaagcagagttgttcctccggcagatgattgataaaggtgttcaaccgaacaaagtgacatataatgtcatgatccatggatattccactctgggccagtggaaagaagcgggtaaaatgttcagagaaatgacaagacagggtctcataccagatcttgttacttggacctcgttcatggcctctctctgtaagcatggaagaaccaaagaagctgccgatttttttgattccatgactgccaagggccacaagcctgatttggtcacgtaccatgttctgctccatgggcatgcaaccgaaggatgctttgctgatatgattaatctctttaatgcaatggcaaccaaaggtattctacccgaccgtcaggttttcaacattttaattgatgcacatgctaaacatggaatgatggatgaagctatgcacatatttactggaatgcaggggcaaggagtgtgtccagatgtatggacctattcaactctaatatctgcactttgcagaatgggtaggctggctgatgccatggataacttcagtcagatgattggtaagggagtacaaccgaacacagttgtttatcactccctaattcagggtttctctacacatggtgatttgaggaaagcaaaggagttggtttatgaaatgacgaacaaaggtattccttgtccaaacattgcattcttcagttctataatggacagtctatgcaaagaaggaagggttatggatgcacatgatatcttccacttggttacagacataggtctgaaacctaacatcattacgtttaatacgctgattgatggatattgcttagtcggtgagatggagaaagcatttggagtacttgattccatggtatcagctggcattgaggctgatgtttttacatataatacacttgcttatggctattgtagatgtggaaggattgatgatgggttgattctattcagagaaatggtgcaaaacaaacctaagcccacaacaatcacatataacatcatactggatgggttatttcgtgctgggagaacatttgctgcaaagaaaatgttccttgagatgaccgaaacgggaataacagtgagcatttccacatacagtataatacttggaggactttgtaggaataattgctctgacgaagcgatcaccctatttcagaaattaggagcaatggatgtgaagtttgatattaaaatactcaataccatgatcaatgccatgttcaaggttcggagaagagaagaagctaacggtttgtttgctggaatatcagccagtaggatggtacctaatgcttctacctacagcgtaatgataggaaatcttctaaaagaaggatcagtggaagaagctgaaaatatgttctcattaatggagaagagtggttgtgctccagactctcgtcttataaataatatcatcagaatattattggaaaacggtgacatcgtcaaggctggaaattatatgtctaaagttgatggcaagagcatctcgcttgaagcttcaactacttcgttgttgatgtgtctcttttcaagtaaagggaaatatcgggaacaaatcagtttgctccctgtaaattaccaatttttcaatggagtcagt

SEQ ID NO: 1758 - DNA, 2460 bp, Triticum aestivum; identical to SEQ ID NO: 1755

SEQ ID NO: 1759 - DNA, 2460 bp, Triticum aestivum; identical to SEQ ID NO: 1755

SEQ ID NO: 1760 - DNA, 2460 bp, Triticum aestivum
atgtcccgcctccgccactccacctccaccgcgccgatgttccacctccgcctcctccgctgccgcttctcctccatctccaccttgccgccgtcacgctcatggtctccccatgcagcctttgccgcggccacagagcgcgtcatcgctgggacgctcagcccggaggacgcacaccgcctgttcgacgaattgctacggcaggccactccggtccccgcgcgctccctgaacggcttcctcacggccctctcccgtgcgccggacaccggcgcctgcagagacggccccgccctcttcaaccgcacccgccgagaagaggccggctcccgggtggtgtcgtccacaatcttcacctacggcatcctcatgaactgctgcggccgcacgcgtcgtccggaacttgggcttgccttctttgggcgcgtcctcaggatgggcctgaagacaaatgtggtcgtcgccaccatggtcctccagtgcctctccagcgccaaacggacagatgaggctgtggacatcctgctacatcggatgtccgagctcgggtgcgtgcctgacgccttctcatactccattgttctgaagagcttatgcgatgatagcaggagccagcgggcactcgacctgctccacatgtgggagaaagaacgaggtgtctgctcccccaacgtagtgacgtataacacggtcatccacggcttctttaaggaaggtgaagtaagcaaggcatgcaatctattccatgaaatggtgcagaaaggggttgaacctaatgtggtgacatatagcttgaccattgatgcgctgtgcaaggccagaactatggacaaagcagagttgttcctccggcagatgattgataaaggtgttcaaccgaacaatgtgacatataatgtcatgatccatggatattccactctgggccaatggaaagaagcgggtaaaatgttcacagaaatgacaagacagggtctcataccagatcttgttacttggacctcgttcatggcctctctctgtaagcatggaagaaccaaagaagctgccgaattttttgattccatgactgccaagggccacaagcctgatttggtcacgtaccatgttctgctccatgggcatgcaaccgaaggatgctttgctgatatgattaatctctttaatgcaatggcaaccaaaggtattctacccgaccgtcaggttttcaacattttaattgatgcacatgctaaacatggaatgatggatgaagctatgcacatatttactggaatgcaggggcaaggagtgtgtccagatgtatggacctattcaactctaatatctgcactttgcagaatgggtaggctggctgatgccatggataacttcagtcagatgattggtaagggagtacaaccgaacacagttgtttatcactccctaattcagggtttctctacacatggtgatttgaggaaagcaaaggagttggtttatgaaatgacgaacaaaggtattccttgtccaaacattgcattcttcagttctataatggacagtctatgcaaagaaggaagggttatggatgcacatgatatcttccacttggttacagacataggtctgaaacctaacatcattacgtttaatacgctgattgatggatattgcttagtcggtgagatggagaaagcatttggagtacttgattccatggtatcagctggcattgaggctgatgtttttacatataatacacttgcttatggctattgtagatgtggaaggattgatgatgggttgattctcttcagagaaatggtgcaaaacaaacctaagcccacaacaatcacatataacatcatactggatgggttatttcgtgctgggagaacatttgctgcaaagaaaatgttccttgagatgaccgaaacgggaataacagtgagcatttccacatacagtataatacttggaggactttgtaggaataattgctctgacgaagcgatcaccctatttcagaaattaggagcaatggatgtgaagtttgatattaaaatactcaataccatgatcaatgccatgttcaaggttcggagaagagaagaagctaacggtttgtttgctggaatatcagccagtaggatggtacctaatgcttctacctacagcgtaatgataggaaatcttctaaaagaaggatcagtggaagaagctgaaaatatgttctcattaatggagaagagtggttgtgctccagactctcgtcttataaataatatcatcagaatattattggaaaacggtgacatcgtcaaggctggaaattatatgtctaaagttgatggcaagagcatctcacttgaagcttcaactacttcgttgttgatgtgtctcttttcaagtaaagggaaatatcgggaacaaatcagtttgctccctgtaaattaccaatttttcaatggagtcagt

SEQ ID NO: 1761 - DNA, 2475 bp, Triticum aestivum
atgccccgctcccgcctccgtcgctacgcctccaccatgccgatgtccagcctccgtcccctccaccgcagctcctcctccaccacgtcgcctgcacgcgcctggtccccccatgccgccttcgccgcggccacggagcgtgtccgcgccgggacggtcaggccggaagacgcacacaccctgttcgacgaattgcttcggcaggccacaccggtcccccagcgatccctgaacggcttccttgccgccctcgcccgtgcgcccgcctccggcgcctgcatcagagatggccccgcccttgcagtggctctcttcaaccgtgtgtgcagagacgaagccggcccgcaggtggcggcgctcacaggctgcacctacagcatcctcatggactgctgctgccgcgcccgtcgcccggacctagggcttgccttatttggccgcttcctcagggaaggcctgaagacagaccagatcgtcgccaacaccttcctcaagtgcctctgctacgcgaaacggacggatgaggcagtggacgtgctgcttcataggatgtccgagctcgggtgtgtgcctgatgccttctcatacaacactgtcctgaagagcttatgcgacaatggcatgagtcagcgggcgctcgacctgctccagaggatggcgaaagaaggaggtgtctgctctctcaatctggtggcatataacacggtcatccatggcttctttaaggaaggtgaaacaggcaaggcatgcagtctgttccatgaaatgatgcagcaaggtgttgtgcccaatgtgtggacgtatacctcgattattgatgcattgtgcaaggccagagcaatggacaaggcagagctagtccttcgtcagatggttgctaaaggtgctcaacctgatatagtgacatatacttgcatgatcaatggatatgccacatctgggcggttgaaagaggctgctaaaatgttcagagaaatgaaaagccggggtcttacaccaaatattgttacctgcggctcgttaatgacttacctttgcaagcatggaagaagcaaagaagctagagaaatatttgattccatgactgccaaaggccacagagctaatgtcgtctcgtactgtattttgcttcatgggtatgccaatgaaggatgctttgctgatatgattgatctctttaattcaatgaaaagcaacggtattgcagccgactgccgtgttttcaacatattaattaatggatatgctaaacgtggaaagatggatgaagctatgctcatatttacggaaatgtgggaaaaaggagtgagtcccgatgtggttacctattccactgtaatagctgcactttccaggatgggtagattgaccgatgccatggacaaatttaatcagatgatttccatgggggttcaaccgaacacagctgtttatcactccctaattcagggctcttgtatgcatggtgatttgattaaagccaaggagctggtttctgaaatgatgaacaaaggtattcctcgtcctagcattgcgttcttcggttcaataataaacaggttatgcaaagatggaagggttatggatgcacatgatatctttgacttggttatagacataggcgagaggcctagtgtcattacatttaattcactgattgacggatattgcttagtcgggaagatggataaagcatttaaaatactcgatgccatggaagtagttggtgttgagtctgatgttattacatatagtacacttcttgatggctattttaaaaatggaaggatcaatgatggtttgactctgtttagagaaatgccgcataagggaattaaacctgacactgtgacatatggcatcatgttggatgggttgtttcgtgctggcagaactgttgctgtaaggacagtgttccatgagatgatcgaaagtggaataacagtggacatccccacatacaatatagttcttggaggactttgtagaaataactgcacagatgaagcaatcgccctgttccagaaattaggtgcaatgagtgtgaagtccaatattgcaatactcaataccatgatcgatggaatgtacaaggttcggagaagagaagaagccaatgatttatttgctacaatatcagccagtggattggtgcccaatgaatctacttatgcagtaatgataataaatcttctaaaagatggagcagtggaagaagcagacaatatgttttcatcaatggagaaaactggtatagtccccagctcccgtctgttaaatcacatcatcagaatgttgttggaaataggtgagattgccaaggccggaaattacttgtctaaagttgatgggaagagcatctcacttgaagcgtcaacaacttcattgatgttgtctttcttttcgaagaaaggcaaatatcgggaggacatgaaattgctgcctgcaaagtttcaaatttttgatggatttggt

SEQ ID NO: 1762 - DNA, 2475 bp, Triticum aestivum
atgccccgctcccgcctccgtcgctacgcctccaccatgccgatgtccagcctccgtcccctccaccgcagctcctcctccaccacgtcgcctgcacgcgcctggtccccccatgccgccttcgccgcggccacggagcgtgtccgcgccgggacggtcaggccggaagacgcacacaccctgttcgacgaattgcttcggcaggccacaccggtcccccagcgatccctgaacggcttccttgccgccctcgcccgtgcgcccgcctccggcgcctgcatcagagatggccccgcccttgcagtggctctcttcaaccgtgtgtgcagagacgaagccggcccgcaggtggcggcgctcacaggctgcacctacagcatcctcatggactgctgctgccgcgcccgtcgcccggacctagggcttgccttatttggccgcttcctcagggaagacctgaagacagaccagatcgtcgccaacaccttcctcaagtgcctctgctacgcgaaacggacggatgaggcagtggacgtgctgcttcataggatgtccgagctcgggtgtgtgcctgatgccttctcatacaacactgtcctgaagagcttatgcgacaatggcatgagtcagcgggcgctcgacctgctccagaggatggcgaaagaaggaggtgtctgctctctcaatctggtggcatataacacggtcatccatggcttctttaaggaaggtgaaacaggcaaggcatgcagtctgttccatgaaatgatgcagcaaggtgttgtgcccaatgtgtggacgtatacctcgattattgatgcattgtgcaaggccagagcaatggacaaggcagagctagtccttcgtcagatggttgctaaaggtgctcaacctgatatagtgacatatacttgcatgatcaatggatatgccacatctgggcggttgaaagaggctgctaaaatgttcagagaaatgaaaagccggggtcttacaccaaatattgttacctgcggctcgttaatgacttacctttgcaagcatggaagaagcaaagaagctagagaaatatttgattccatgactgccaaaggccacagagctaatgtcgtctcgtactgtattttgcttcatgggtatgccaatgaaggatgctttgctgatatgattgatctctttaattcaatgaaaagcaacggtattgcagccgactgccgtgttttcaacatattaattaatggatatgctaaacgtggaaagatggatgaagctatgctcatatttacggaaatgtgggaaaaaggagtgagtcccgatgtggttacctattccactgtaatagctgcactttccaggatgggtagattgaccgatgccatggacaaatttaatcagatgatttccatgggggttcaaccgaacacagctgtttatcactccctaattcagggctcttgtatgcatggtgatttgattaaagccaaggagctggtttctgaaatgatgaacaaaggtattcctcgtcctagcattgcgttcttcggttcaataataaacaggttatgcaaagatggaagggttatggatgcacatgatatctttgacttggttatagacataggcgagaggcctagtgtcattacatttaattcactgattgacggatattgcttagtcgggaagatggataaagcatttaaaatactcgatgccatggaagtagttggtgttgagtctgatgttattacatatagtacacttcttgatggctattttaaaaatggaaggatcaatgatggtttgactctgtttagagaaatgccgcataagggaattaaacctgacactgtgacatatggcatcatgttggatgggttgtttcgtgctggcagaactgttgctgtaaggacagtgttccatgagatgatcgaaagtggaataacagtggacatccccacatacaatatagttcttggaggactttgtagaaataactgcacagatgaagcaatcgccctgttccagaaattaggtgcaatgagtgtgaagtccaatattgcaatactcaataccatgatcgatggaatgtacaaggttcggagaagagaagaagccaatgatttatttgctacaatatcagccagtggattggtgcccaatgaatctacttatgcagtaatgataataaatcttctaaaagatggagcagtggaagaagcagacaatatgttttcatcaatggagaaaactggtatagtccccagctcccgtctgttaaatcacatcatcagaatgttgttggaaataggtgagattgccaaggccggaaattacttgtctaaagttgatgggaagagcatctcacttgaagcgtcaacaacttcattgatgttgtctttcttttcgaagaaaggcaaatatcgggaggacatgaaattgctgcctgcaaagtttcaaatttttgatggatttggt

SEQ ID NO: 1763 - DNA, 2475 bp, Triticum aestivum; identical to SEQ ID NO: 1762

SEQ ID NO: 1764 - DNA, 2475 bp, Triticum aestivum; identical to SEQ ID NO: 1762

SEQ ID NO: 1765 - DNA, 2475 bp, Triticum aestivum; identical to SEQ ID NO: 1761

SEQ ID NO: 1766 - DNA, 2475 bp, Triticum aestivum; identical to SEQ ID NO: 1762

SEQ ID NO: 1767 - DNA, 2475 bp, Triticum aestivum
atgccccgctcccgcctccgtcgctacgcctccaccatgccgatgtccagcctccgtcccctccaccgcagctcctcctccaccacgtcgcctgcacgcgcctggtccccccatgccgccttcgccgcggccacggagcgtgtccgcgccgggacgctcaggccggaagacgcacacaccctgttcgacgaattgcttcggcaggccaccccggtccccgaccgctccctcaacggcttccttgccgccctcgcccatgcgcccgcctccggcaactgcatcagagatggccccgccctcgcagttgctctcttcaaccgtgtgtgcagagaggaagccggcccgcgggtggcggtgctcacaggctgcacctacagcatcctcatggactgctgctgccgcgcccgtcgcccggacctagggcttgccttatttggccgcttcctcagggaaggcctgaagacagaccagatcgtcgccaacaccttcctcaagtgcctctgctacgcgaaacggacggatgaggcagtggacgtgctgcttcataggatgtccgagctcgggtgtgtgcctgatgccatctcatacaacactgtcctgaagagcttatgcgacaatggcatgagccagcgggggctcgaactgctccagatgattgcaaaagaaggaggtgtctgctctctcaatctggtggcatataacacggtcatctacggcttctttaaggaaggtgaaacaggcaaggcacgcaatctattccatgaaatgatgcagcaaggtgttgagcccgatgtggtgacttacaacttgatcattgatgcgttgtgcaaggccagagcaatggacaaggcagaagtagtccttcagcagatgatcagtaaaggtgctcaacctgatacagtgacatataattgcatgatcaatggatatgccacatctgggcggttgaaagagtctgctaaactgttcagagaaatgaaaagccggggtcttacaccaaataatgttacttgcaactccttcctgtcctccctttgcaagcatggaagaagcaaagaagctagagaaatatttgattccatgactgccaaaggccgcagagctaatgtcgtctcatactctattttgcttcatgggtatgccaatgaaggatgctttgctgatatgattgatctctttaattcaatgaaaagcaacggtattgcagctgactgccgtgtttttaccatattaattgatgcctatgctaaacgtggaatgatggatgatgcaatgcacatatttacggaaatgcaacaacaaggtgtgagtccaaatgttgtcacatattcaactgtaatatcagcactttctagaatgggtaggttgaccgattctatggaaaaatttaatcagatggttgccttgggagtacagccggatagagctatttatcggtccctaattcagggcttttgtatgcatggtggtttggttaaagctaaggagttggtttctcaaatgataaacaaaggtattcctcgtcctagcattgagttcttcaattcagtaataaacagtatgtgcaaggaaggaagggttatggatgcacatgatatctttgacttggttatagacattggtgagaggcctgatgacattacatttaattcactgattgacggatattgcttagtcgggaagatggataaagcatttaaaatactcgatgccatggaagtagttggtgttgagcctgatgttattacatataatacacttcttgatggctattttaaaaatggaaggatcaatgatggtttggctctgtttagagaaatgccgcataagagaattaaacctgacattgtgacatatggcatcatgttggatgggttgtttcgtgctggcagaactgtttctgcaaggacaatgttccatgagatgatcgaaagtggaataacagtgaacatcttcacatacaatatagttcttggaggactttgtagaaataactgcacagatgaagcaatcgccctgttccagaaattaggtgcaatgagtgtgaagttcaatattgcaacacttaataccatgatcgatggaatgtacaaggttcggagaagagaagaagccaatgatttatttgctacaatatcagccagtggattggtgcccaatgaatctacttatgcagtaatgataataaatcttctaaaagatggagcagtggaagaagcaaacaatatgttttcctcaatggagaaaactggtatagtccccagctcccgtctgttaaatcgcatcatcagaatgttgttggaaataggtgagattgccaaggccggaaattacttgtctaaagttgatgggaagagcatctcacttgaagcgtcaacaacttcattgatgttgtctttcttttcgaagaaaggcaaatatcgggaggacatgaaattgctgcctgcaaagtttcaattttttgatggatttggt

SEQ ID NO: 1768 - DNA, 2442 bp, Triticum aestivum
atgtcgcgcatccgcctccgccgccgccgccgccaccgcctcccctcttccacctcgcgaccctcaccctcgtggtctccccacgccgcctgtgcggcggccacggagcgcgtccgcgccggaacgctcagcccgcaagacgcacaccacctgttcgacgaattgttaaggcaggccaccccggtccctgagcgctccctgaacggattcctcgccgccctcagccgtgctacgccctccaaagcctgcagagacggccccgccctcgtcctctccctcttcaaccgtgtctgccgagaagaagccggcggcatgcgggtggcgccgcccaccatcttcacctacggcgtcctcatgaactgctgctgccgcacccgtcgtccggaacttgggctcgccttcttcggccgcctcctaaggacgggcctgaaggcagacaagaccatcgccaacactgtcctcaagtgcctgtgctgcgctaaacggacagacgatgctgtgaaagtgctgcgtcgtaggatgagcgagctggggtgtgtgcctgatgccttctcatacgccattgtcctgaagggcttatgtgatgataacaggagccagcaggcgctcgacctgctccggatgatggcgaaagaaggtgtgtgctcccctgacgtggtcacatataacacggtcatccacggcttctttaaggaaggaaaaataggcaaggcctgcaatctattccatgaaatgacgaagcaagggtttgtgcctaatgtggtgacatataactcggttatcagtgcattgtgcaaggcccgagcaatggacaatgcagagttgttccttcgggagatggttgataacggcgttcaaccgaataaagtgacatatactagcatgatccatggatattccactttgggccagtggaaagaggcgactaaactgttcagagaaatgacaagcagtggtcttataccagatattgtcacttggaattcgttcattgactccctttgcaagcatggaagaagcaaagaagctgcagaaaattttcattccatgtctgcaaagggccacaagcctgatatcatctcctacgccactcttcttcatgggtatgccaatgaaggaagctttcctgatatgatgagtttctttaagtcaatggaaggcgacggtattgtagccaactgccaagttttcaacatattaattgatgcatatgctaaacgaggaatgatggacgaagctatgctcatatttactgaaatgccaggacaaggagtcaatccaaatgtagtcacctattcaactgtgatagcttcactttgcagaatgggtaggctggctgatgcaatgaataagttcagtgagatgattggtacgggagtacaaccgaacacagttgtttatcactccctagttcagggcttatgtacacatggtgatttggtgaaagcgaaggagttgatttctgaaatgatgaataaaggtattcctcgtccaaacattgcattcttcagttcaatagtacacagtctatgcaaagaaggaagggttatggatgcacaccatatctttgacttggttaaagacataggggagagatctgacatcattatgtttaatacgctgattgatggatattgcctaattggtgagatgggcaaagcagtcagtgtactagatgtcatgatatcagccggcattgagcctgatatctttacatataatacacttgtcaatggttattttaagagtggaaggattgatgatgggttgaatctgttcagagaaatgtcacataagaaaattaaaccttcaactgttacatataacatcatactggatggattatttcgtgctgggagaaccgttgctgccaagaaaatgctccatgagatgatcggatgtggaacaactgtgagcttgtccacatacaacataattcttagaggactttgtagaaataattgcaccgacgaagcaatcgccatgttccagaaattacgcacaattaatgtaaagttcaatatcacaacactcaataccatgattaattcaatgtacactgttcagagaagagaagaagctaaagatttgtttgctgcaatatcagacagcgggttggtgcccaatgtctctacatacggcataatgatacgaaatcttctaaaagaaggatcagtgaaagaagctgacaatatgttcttatcaatggagaagagtggttgtgctccttgctcccgtcttttaaatgataccattagaacgttattggagaagggggagatagtcaaggccggaaattatatgtctaaagttgatggcaagagcatctcacttgaagcttcaactagttcattgttgttgtctctgttttctgggaaaggtaaatatcgtgaacaaatacaattgctccctgtaaaataccaattcttcggtggagttagt

SEQ ID NO: 1769 - DNA, 2442 bp, Triticum aestivum; identical to SEQ ID NO: 1768

SEQ ID NO: 1770 - DNA, 2442 bp, Triticum aestivum
atgtcgcgcatccgcctccgccgccgccgccgccaccgcctcccctcttccacctcgcgaccctcacccacgttgtctccccacgccgcctgtgcggcggccacggagcgcgtccgcgccggaacgctcagcccgcaagacgcacaccacctgttcgacgaattgttaaggcaggccaccccggtccccgagcgctccctgaacggattcctcgccgccctcagccgtgctacgccctccaaagcctgcagagacggccccgccctcgtcctctccctcttcaaccgtgtctgccgagaagaagccggcggcatgcgggtggcgccgcccaccatcttcacctacggcgtcctcatgaactgctgctgccgcacccgtcgtccggaacttgggctcgccttcttcggccgcctcctaaggacgggcctgaaggcagacaagaccatcgccaacactgtcctcaagtgcctgtgctgcgctaaacggacagacgacgctgtgaaagtgctgcgtcgtaggatgagcgagctggggtgtgtgcctgatgccttctcatacgccattgtcctgaagggcttatgtgatgataacaggagccagcaggcgctcgacctgctccggatgatggcgaaagaaggtgtgtgctcccctgacgtggtcacatataacacggtcatccacggcttctttaaggaaggaaaaataggcaaggcctgcaatctattccatgaaatgacgaagcaagggtttgtgcctaatgtggtgacatataactcggttatcaatgcattgtgcaaggcccgagcaatggacaatgcagagttgttccttcagcagatggttgatgacggcgttcaaccgaataaagtgacatatactagcatgatccatggatattccactttgggccagtggaaagaggcgactaaactgttcagagaaatgacaagcagtggtcttataccagatattgtcacttggaactcgttcattgactccctttgcaagcatggaagaagcaaagaggctgcagaaatttttcattccatgtctgcaaagggccacaagcctgatatcatctcctacgccactcttcttcatgggtatgccaatgaaggaagctttcctgatatgatgagtctctttaagtcaatggaaggcgacggtattgtagccaactgccaagttttcaacatattaattgatgcatatgctaaacgaggaatgatggacgaagctatgctcatatttactgaaatgccaggacaaggagtcaatccaaatgtagtcacctattcaactgtgatagcttcactttgcagaatgggtaggctggctgatgcaatgaataagttcagtgagatgattggtacgggagtacaaccgaacacagttgtttatcactccctagttcagggcttatgtacacatggtgatttggtgaaagcgaaggagttgatttctgaaatgatgaataaaggtattcctcgtccaaacattgcattcttcagttcaatagtacacagtctatgcaaagaaggaagggttatggatgcacaccatatctttgacttggttaaagacataggggagagatctgacatcattatgtttaatacgctgattgatggatattgcctaatcggtgagatgggcaaagcactcagagtacttgatgccatgatatcagctggcattgagcctgatatctttacatataatacacttgtcaatggttattttaagagtggaaggatcaatgatgggttgagtctgttcagagaaatgtcacacaaggaaattaaacctacaactgttacatataacatcatactggatggattatttcgtgctgggagaactgttgctgccaagaaaatgctccatgagatgaccggatgtggaacaactgtgagcttgtccacatacaacataattcttagaggactttgtagaaataattgcaccgacgaagcaatcgccatgttccagaaattacacacaatgaatgtaaagttcaatatcacaacactcaataccatgattaattcaatgtacactgttcagagaagagaagaagctaaagatttgtttgctgcaatatcagacagtgggttggtgcccaatgcctctacatacgacataatgatacgaaatcttctaaaagaaggatcagtggaagaagctgacaatatgttcttatcaatggagaagagtggttgtgctccttgctctcgtcttttaaatgataccattagaacgttattggagaagggggagatagtcaaggccggaaattatatgtctaaagttgatggcaagagcatctcacttgaagcttcaactagttcattgttgttgtctctgttttctgggaaaggtaaatatcgtgaacaaatacaattgctccctgtaaaataccaattcttcggtggagttagt

SEQ ID NO: 1771 - DNA, 2442 bp, Triticum aestivum
atgtcgcgcatccgcctccgccgccgccgccgccaccgcctcccctcttccacctcgcgaccctcaccctcgtggtctccccacgccgcctgtgcggcggccacggagcgcgtccgcgccggaacgctcagcccgcaagacgcacaccacctgttcgacgaattgttaaggcaggccaccccggtccctgagcgctccctgaacggattcctcgccgccctcagccgtgctacgccctccaaagcctgcagagacggccccgccctcgtcctctccctcttcaaccgtgtctgccgagaagaagccggcggcatgcgggtggcgccgcccaccatcttcacctacggcgtcctcatgaactgctgctgccgcacccgtcgtccggaacttgggctcgccttcttcggccgcctcctaaggacgggcctgaaggcagacaagaccatcgccaacactgtcctcaagtgcctgtgctgcgctaaacggacagacgatgctgtgaaagtgctgcgtcgtaggatgagcgagctggggtgtgtgcctgatgccttctcatacgccattgtcctgaagggcttatgtgatgataacaggagccagcaggcgctcgacctgctccggatgatggcgaaagaaggtgtgtgctcccctgacgtggtcacatataacacggtcatccacggcttctttaaggaaggaaaaataggcaaggcctgcaatctattccatgaaatgacgaagcaagggtttgtgcctaatgtggtgacatataactcggttatcagtgcattgtgcaaggcccgagcaatggacaatgcagagttgttccttcgggagatggttgataacggcgttcaaccgaataaagtgacatatactagcatgatccatggatattccactttgggccagtggaaagaggcgactaaactgttcagagaaatgacaagcagtggtcttataccagatattgtcacttggaattcgttcattgactccctttgcaagcatggaagaagcaaagaagctgcagaaaattttcattccatgtctgcaaagggccacaagcctgatatcatctcctacgccactcttcttcatgggtatgccaatgaaggaagctttcctgatatgattagtttctttaagtcaatggaaggcgacggtattgtagccaactgccaagttttcaacatattaattgatgcatatgctaaacgaggaatgatggacgaagctatgctcatatttactgaaatgccaggacaaggagtcaatccaaatgtagtcacctattcaactgtgatagcttcactttgcagaatgggtaggctggctgatgcaatgaataagttcagtgagatgattggtacgggagtacaaccgaacacagttgtttatcactccctagttcagggcttatgtacacatggtgatttggtgaaagcgaaggagttgatttctgaaatgatgaataaaggtattcctcgtccaaacattgcattcttcagttcaatagtacacagtctatgcaaagaaggaagggttatggatgcacaccatatctttgacttggttaaagacataggggagagatctgacatcattatgtttaatacgctgattgatggatattgcctaattggtgagatgggcaaagcagtcagtgtactagatgtcatgatatcagccggcattgagcctgatatctttacatataatacacttgtcaatggttattttaagagtggaaggattgatgatgggttgaatctgttcagagaaatgtcacataagaaaattaaaccttcaactgttacatataacatcatactggatggattatttcgtgctgggagaaccgttgctgccaagaaaatgctccatgagatgatcggatgtggaacaactgtgagcttgtccacatacaacataattcttagaggactttgtagaaataattgcaccgacgaagcaatcgccatgttccagaaattacgcacaattaatgtaaagttcaatatcacaacactcaataccatgattaattcaatgtacactgttcagagaagagaagaagctaaagatttgtttgctgcaatatcagacagcgggttggtgcccaatgtctctacatacggcataatgatacgaaatcttctaaaagaaggatcagtgaaagaagctgacaatatgttcttatcaatggagaagagtggttgtgctccttgctcccgtcttttaaatgataccattagaacgttattggagaagggggagatagtcaaggccggaaattatatgtctaaagttgatggcaagagcatctcacttgaagcttcaactagttcattgttgttgtctctgttttctgggaaaggtaaatatcgtgaacaaatacaattgctccctgtaaaataccaattcttcggtggagttagt

SEQ ID NO: 1772 - DNA, 2442 bp, Triticum aestivum; identical to SEQ ID NO: 1768

SEQ ID NO: 1773 - DNA, 2442 bp, Triticum aestivum; identical to SEQ ID NO: 1768

SEQ ID NO: 1774 - DNA, 2442 bp, Triticum aestivum; identical to SEQ ID NO: 1768

SEQ ID NO: 1775 - DNA, 2436 bp, Triticum aestivum
atgtccaacctccgcctcctccgccgcagctcctcctccacctccacccccacctcgtggtcctcgcgttcatggtctccccacgcagcctttgccgcggccacagagcgtgtccgcgccgggacgctgaaccaagacgacgcacaccacctgtttgacgaattgctgcggcaggccaacccggtccccgggcgctccctgaacggcttcctcgccgccctcgcacgtgctacgtcctctgccgcctgcatcagagatggtcccaccctcgccatcgccctcttcaaccgcctgtgccgagaacaagccggcctgcgggtagcgcctctcacgatccacacctacggcatcctcatggactgctgctgtcgtgcaagtcgcccggagctagggcttgccttattcggccgctttctcaggacgggcctcaagacaaacgagatcgtcgccagcaccttcctcaagtgcctctgctacgcaaaacggacggatgaggctgtgaatgtgctgcttcataggatgtccgagctcggctgtgtgcctaatgccatctcatactccattgttctgaagagcttatgcgacaatagcatgagtctgcgggcgctcgacctgctccagatgatggcgaaagaaggaggtgcctgctcccccaacgtggtggcatatagcacggtcatccatggcttctttaaggaaagcgaaacaggcaaggcatgcaatctgttccatgaaatgatgcagcaaggtgttgaacccagtgtgtggacatatagttcaatcattgatgcattgtgcaaggccagagcaatggacaaggcagagctagtgcttcagcagatggttaacaaaggtgttcaacccaataatgtcacatataattgcatgatccatggatattccacatctgggcagtggaaagaggctgctaaattgctcagagaaatgaaaagccggggccttataccagatattgtcacttgcaactcgttcctggcctccctttgcaagcatgggagaagcaaggaagctgcagaatttcttgattccatgactgccaagggccacaaaccagatatcgtatcataccgtattttgcttcatgggtatggtactgaaggatgcttcgctgatatgattgatgtcttttattcaatggaaagcaacggtattgcagctgactgccatgttttcaacatattaattaatggatatgcaaaacgtggaatgacagaagaagctatgctgatatttactgaaatgcagggacagggagtgagtccagatgtagtcacctattccattgtaatagccgcactttccagaatgggtaggctgaccgatgctatcgagaaattcaatgagatgactgccttggaagtacagccggacacaactgtttatcactcactgattcagggttgttgcatagacggttatttggttaaagctaaggagctgatgtttgaaatgatgaacggtggtattcctcggcctaacattgtgttcttcagttcagtaataaacagtctgtgcaaagaaggaagggttatggatgcacatgatgtcttagacttggttataggcataggtgagaggcctaatgtcattacatttaattcactgattgacggatattgcttagtcggcaacatggataaagcattcaaaatacttgatgtcatggaatcagttggtgttgagcctaatgttgttacttatagtgcacttcttgatggctattctaaaaacagaaggattgatgatgctttgactttgtttagagaaatgccgcgtaagagaattaaacctgacactgttacatatggcatcatgttggatgggttgtttcgtgctgggagaactgtcgctgcaatggaaatgttccatgagatgactgagagtggaacaacagtggacattttcatatacaatataatacttggaggtctttgtagaaataattgtgtagatgaagcgattgcactgttccagaaattgcgagcaatgaatgtgaagttcaatattgaaatactcaataccatgattaatgcaatgtacaaggttcaaagaaaggaagaagcaaaggaattgtttgctacaatatcagccaatgggttggtgcccaatgaatctacttatgcagtaatgataagaaatcttctaaaaggcggagcagtggaagatgctgacaatatgttttcatcaatggacaacagtggcatcgttcccagttcccgtcttataaatgatatcatcagaatgttgttgaaaaaaggtgagatagccaaggctggcaattatttgtctaaagttgacgggaagagtatctcacttgaagcttcaactacctcattgttgttgtctcggaaagggaaacatcaggtggatattaagttgctccctgcaaagtatcaattttttgatggatttggt

SEQ ID NO: 1776 - DNA, 2436 bp, Triticum aestivum; identical to SEQ ID NO: 1775

SEQ ID NO: 1777 - DNA, 2436 bp, Triticum aestivum; identical to SEQ ID NO: 1775

SEQ ID NO: 1778 - DNA, 2322 bp, Triticum aestivum
atgccaaccgcccgcctgtcctccgtctccgcctcctccttcaaggcttcttcacgaaaaccacgagcccccctcgccgccttggctgctgccacggagcgtgtgcgcgccggaacactaagccaggaggacgcgcaccacctgttcgacgaattgctaggccaagccaccgccgtcccggaacgcgggctgaacaactttcttgccgcactagcccgtgcatcgccctcggctacctgcagcgatggccccggccttgccgtcaccctcttcaaccgcatgtcccttggcgctggtgcacgggtggcgtcgcccacactctgtacctattccatcctcatggactgctgctgccgtgcaggccgcccagacttggtggttgccttcttcggccgcctcctcaggttggggctgcgcttgaatgtcatctccttcaacaacctcctcaaggggctttgccaggctaagcgctcaaatgaggcattggatctgctgctccaccggatgcccgaactggactgtgcgcctgatgtcttctcgttcaacatagtaatcaacggctgctttagagaaggtgaagtagacaaagcatgcaatctcttccatgagatgccccaactgggagttcaacctgatgtggtgacctacaactcaattatcatcgcactaagcagggccggagcaatgggtaaggcagaagtggtccttcggcaaatggttgataaaggcattggacccgatgtcatgacatataacagtctgatccatggatattctactttgggtcagtggaaggcagcagttagggtattcaaagagatggtaagtgttggtgttctaccaaatgctgtcacgttgaactcatttatggattcactttgcaagcatagaaggacaaaggaagctagagatatttttgactccatggctgcaaagggccacaaacctaatattgcctcctactctactatgcttaatgggtatgcgaaacaaggatgcttcgatgatatgactggtctcttcaattccatggtacagaatggtattgtacctaacaaccatgttttcaacatactgatcagagcatattctacacgtggactgatggacgaggctatgcacatgttcgaagtaatgaagcaacaaggagtaaacccagatgtagttgactatctagtagtaatagattcactttgcaaaatgggcaggatggatgctgctatggacaaatttaatcagatggtcaatcaaggagtttcacctgacatagttgtttaccaatgcctggttctgggttcttgctctaatggtgattttgtgaaagccaaagaattgatttctgaagcagttaatcgaggtctgtgttctaacagtgtgttcttctatcctgtaataaacaacctgagcaaagaaggaaatgtaaaggatgcacaagatatgtttgacttcattgtaggtattggtcatcagcctgatgttattatgtacaattcactgatggatggatattgccttgttggcaaggtggaggaagcaatgacagtgcttgatgctatgaagtccgctggcctccaacctgatgctattacgtatgctatacttcttaatggctactgtaaaattggaaggatcgacgatggattgagtctttttagggaaatctcactcagcagggttaagcccacgactattatgtacaacattatacttgatgggctgttttgctgtgggagaacagtttttgcaaaggaagaattcgatacaatgattgaaagtggcataccagtgggcattgacacatgcaccatagttcttagtggactttgcaaaaataattgcactgatgaagcaatagagctgttcaagaagttatgtgcaatgaatgtgaagtttgatgtcataattctcactaccatgatttctgcaatgtttaagactaggagagttgaagaagccaaggatttgtttgctactatatcaaccatagggttggtgccttctgtcgtgacttacagtgtaatgatgacgaatttcataaaagaagggtcgctggcagaggctgatgatatgtttttagcaatggagaaggctggctgtgctcctgactccagactgctaaatcacgtggtcagagtgttgctggagaaaggtgcagttgtaaaggctgcaacttatctcggtaaacttgatggaaaacagctgtcacttgaagcttcgacggtttcgttaattgtatctctcttctcaaggaaagggaaattaagggagcatgtaaaattgcttccggtaaagtaccagcctcctgagagttcgactgacaat

SEQ ID NO: 1779 - DNA, 2322 bp, Triticum aestivum; identical to SEQ ID NO: 1778

SEQ ID NO: 1780 - DNA, 2322 bp, Triticum aestivum; identical to SEQ ID NO: 1778

SEQ ID NO: 1781 - DNA, 2469 bp, Triticum aestivum
atgtcccgcctccgctccgcctccaccgcgccgatgccccgcctccgcctcctcagctgccgctcctactccatctccaccttgccgccgtcacgctcatggtctccccacgccgcctttgccgctgccacagagcgcgtcagcgctgggacgctcaccccggaggacgcacaccacctgttcgacgaattgctgcggcagtccactccggtccccgctcgatccctgaacggcttccttacggccctggcccgtgcgcgggacaccgacgcctgcagagacggccccgccctcgccctcgccctcttcaaccgcacccgccgagaagaggccggctcccgggtggtgtcgcccacaatcttcacctacggcatcctcatgaactgctgctgccacacgcttcgtccggatcttgggcttgccttctttgggcgcgtcctcaggatgggcctgaagacaaatgtggtcgtcgccaccacggtcctcaagtgcctctgcggcgccaaacggacagatgaggctgtgaacatcctgctacatcggatgtccgagctcgggtgtgtgcctgatgacttctcatattccattgttctgaagagcttatgtgatgatggcaggagccagcgagcacttgacctgctccagatgtgggagaaagaacgaggtgtctgctcccccaacgtagtggcatataacatagtcatccatggcttctttaaggaaggtgaagtaagcaaggcatgtgacctgttccatgcaatggtgcagcgaggggttgtgcctaatgtgatgacatataccttgactattgatgcgctgtgcaaggccagagctatggacaaagcaaagttgttcctccggcagatgattgataaaggtgttcgaccgaacaatgtgacatataatgtcatgatccatggatattccactctgggccagtggaaagaagcgggtaaagtgttcagagaaatgtcaagacagggtctcataccagatatcgttacttggacctcgttcatggcctctctctgcaagcatggaagaaccaaagaagctgccaatttttttgattccatgactgccaagggccacaagcctgatttggtcacgtatcatgttctgctccatgggtatggaaccgaaggatgctttgctgatatgattaatctcgttaattcgatggcaaccaaaggtattgttcccgatcgtcaggttttcaacattttaatcgatgcacatgctaaacatggaatgatggatgaagctatgcacatatttactggaatgcagggacaaggagtgtgtccagatgtatggacctattcaactataatatctgcactttgcagaatgggtaggctggctgatggtatggataacttcagccagatgattggtaagggagtagaaccgaacacagttgtttatcactccctaattcagggtttctctacacatggtgatttgaggaaagcgaaggagttggtttatgaaatgagaaacaaaggtattccttgtccaaacattgcattcttcacttctataatggacagtctatgcaaagaaggaagggttatggatgcacatgatatcttcaacttggttacagacataggtgagaaacctaacgtcattacgtttaatacgctgattgatggacattgcttagtcggtgagatggagaaagcatttggagtacttgattccatggtatcagctggcattgaggctgatgtttttacatataacacacttgcttatggctattgtagatgtggaaggattgatgatgggttgattctattcagagaaatgttgcgtaagaaacctaaacccacaacaattacatataacataatactggatgggttatttcgtgctgggagaacagttgctgcaaagaaaatgttccatgagatgatcgaagggggaataacagtgagcatgtccacgtacagtataatccttggaggactttgtaggaataattgtgctgaagaagcgatcaccctgtttcagaaattaggagcaatgaatgtgaaattggatattagaatactcaataccatgatcaatgcaatgttcaaggttcggagaagagaggaagctaacagtttgtttgctgcaatatcagccagtggaatggcacctaatgcttctacctacggcctaatgatagggaatcttctaaaagaaggatcagtgcaagaagccgaaaatatgttctcattaatggagaagagtggttgtgctccaggctctcgtcttataaataatatcatcagaatattattggaaaaaggtgacattgtcaaggctggaaattatatgtctaaagttgatggcaagaccatctcacttgaagcttcaactacttcgttgttgatgtgtctcttttcaagtaaagggagatatcgggaacaaatcaatttgctccctggaaattaccaatttttcaatggagtcagt

SEQ ID NO: 1782 - DNA, 2316 bp, Triticum aestivum
atgccaaccgcccgcctgtcctccgtcttcgcctcctccttcaagtcttctttacggaagccacgagctcccgtcgccgctttggctgctgccacggagcgtgtgcgcgccagaacgctaagccagcaggacgcgcaccacctgttcgacgaattgctgagccaagccgccgccgtccccgaacgcgggctgaacaactttcttgccgcactagcccgtgctccgccctcatctgcctgcagcgatggccccggccttgccattgccctcttcaaccgcatgtcccaaggcgctggtgcacgggtggtgtcgcccacgctctgtacctattccatcctcatggactgctgctgccgcgcaggccgcccggacttggtggttgccttcttcggtcgcctcatcaggttggggttgcgcttggacgtcatcgccttcagcaatctcctcaaggggctttgcaaggccaagcgctcaaatgaggctttggatctgctgctccaccggatgcccgaactggactgtgcgcctgatgtcttctcctacagcattgtaatcaacggctgctttaaagaaggtgaagtagacaaagcgtgcaatctcttccatgagatgatccaactgggagttcaacctgatgtggccatctacacctcaattatcgatgcactaagcaagtgcggagccatggacaaggcagaagtggtccttcggcaaatggttgatcaaggcattggacccgatgtcatgacatatagcagtctgatccatggatattctactttgggtcagtggaaggcagcagttagggtactcaaagagatggtaagtgttggtgttcgaccagatgctgtcacgttgaactcatttatggattcactttgcaagcatagaaggacaaaggaagctagagatatttttgactccatggctgcaaagggccacaaacctaatattgtctcctacactattatgcttaatgggtatgttaaagaaggatgcttcgatgatatgactggtctcatcaattcgatgctacagaatggtattgtacctgatcaccatgttttcaacatactgatcaatgcatattctaaacgtgggctgatggatgaggctatgcacatgttcgaagtaatgaagcaacaaggagtaaacccagatgtagttgactatctagtagtaatggattcactttgcaaaatgggtaagatggctgctgctatggataaatttaatcagatgatcaatcaaggagtttcacctaacaaagctgtttaccaatgcctggttctgggttcttgctctcatggtgattttgtgaaagccaaggaattgatttctgaagcagttaatagaggtctctgttctaacagtgtgttcttctatcctgtaataaacgacctgtgcaaagaaggaaaggtgaaggaggcacaggatatgtttgacttcattgtaggtattggtcagcggcccgatgtgattatgtacaattcactgatggatggatattgccttgttggcaaggtggaggaagcactgagagtacttgatgctatgaagtctgctggcctccaacctgatgctattacgtatgctatacttcttaatggctactgtaaaattggcaggatcgccgatggattgagtcttttcagggaaatgtcactcagcggggttaagcccacgactattatgtacagcattatacttgatgggctgtttcgctccgggagaacagtttctgcaaaggaaaaattcaatacgatggttgaaagtggcttaccagtggacgttcgcacatacaacatagttcttcatggactttgtagaaacaattgcactggtgaagcaatagagttgttcaaaaaattatgtgcaacgaacttgaagattaatgtcataacattcaataccatgatttctgcaatgtttaaaactaggagaattggagaagccaaggatttgtttgctactatatcagccatcgggttggtgccttctgttgtgacttacagtgtaatgacgacgaatttcataaaagaagggttgctggcggaggctgatgatatgtttttagcaatggagaaggctggctgtgctcctgactccagactgctaaatcacgtggtcagcgtgttgctggagaatggtgcagttgtaaaggctgcaacttatctcgctaaacttgatgcaaaacagctttcacttgaagcttcgacagtttcgttaattgtatctctcttctcaaggaaagggaaattaagggagcatgtaaagttgcttccggtaaagtaccagcctcctgagatgttgggc

SEQ ID NO: 1783 - DNA, 2316 bp, Triticum aestivum; identical to SEQ ID NO: 1782

SEQ ID NO: 1784 - DNA, 2316 bp, Triticum aestivum
atgccaaccgcccgcctgtcctccgtcttcgcctcctccttcaagtcttctttacggaagccacgagctcccgtcgccgctttggctgctgccacggagcgtgtgcgcgccagaacgctaagccagcaggacgcgcaccacctgttcgacgaattgctgagccaagccgccgccgtccccgaacgcgggctgaacaactttcttgccgcactagcccgtgctccgccctcatctgcctgcagcgatggccccggccttgccattgccctcttcaaccgcatgtcccaaggcgctggtgcacgggtggtgtcgcccacgctctgtacctattccatcctcatggactgctgctgccgcgcaggccgcccggacttggtggttgccttcttcggtcgcctcatcaggttggggttgcgcttggacgtcatcgccttcagcaatctcctcaaggggctttgcaaggccaagcgctcaaatgaggctttggatctgctgctccaccggatgcccgaactggactgtgcgcctgatgtcttctcctacagcattgtaatcaacggctgctttaaagaaggtgaagtagacaaagcgtgcaatctcttccatgagatgatccaactgggagttcaacctgatgtggccatctacacctcaattatcgatgcactaagcaagtgcggagccatggacaaggcagaagtggtccttcggcaaatggttgatcaaggcattggacccgatgtcatgacatatagcagtctgatccatggatattctactttgggtcagtggaaggcagcagttagggtactcaaagagatggtaagtgttggtgttcgaccagatgctgtcacgttgaactcatttatggattcactttgcaagcatagaaggacaaaggaagctagagatatttttgactccatggctgcaaagggccacaaacctaatattgtctcctacactattatgcttaatgggtatgttaaagaaggatgcttcgatgatatgactggtctcatcaattcgatgctacagaatggtattgtacctgatcaccatgttttcaacatactgatcaatgcatattctaaacgtgggctgatggatgaggctatgcacatgttcgaagtaatgaagcaacaaggagtaaacccagatgtagttgactatctagtagtaatggattcactttgcaaaatgggtaagatggctgctgctatggataaatttaatcagatgatcaatcaaggagtttcacctaacaaagctgtttaccaatgcctggttctgggttcttgctctcatggtgattttgtgaaagccaaggaattgatttctgaagcagttaatagaggtctctgttctaacagtgtgttcttctatcctgtaataaacgacctgtgcaaagaaggaaaggtgaaggaggcacaggatatgtttgacttcattgtaggtattggtcagcggcccgatgtgattatgtacaattcactgatggatggatattgccttgttggcaaggtggaggaagcactgagagtacttgatgctatgaagtctgctggcctccaacctgatgctattacgtatgctatacttcttaatggctactgtaaaattggcaggatcgccgatggattgagtcttttcagggaaatgtcactcagcggggttaagcccacgactattatgtacagcattatacttgatgggctgtttcgctccgggagaacagtttctgcaaaggaaaaattcaatacgatggttgaaagtggcttaccagtggacgttcgcacatacaacatagttcttcatggactttgtagaaacaattgcactggtgaagcaatagagttgttcaaaaaattatgtgcaacgaacgtgaagattaatgtcataacattcaataccatgatttctgcaatgtttaaaactaggagaattggagaagccaaggatttgtttgctactatatcagccatcgggttggtgccttctgttgtgacttacagtgtaatgacgacgaatttcataaaagaagggttgctggcggaggctgatgatatgtttttagcaatggagaaggctggctgtgctcccaactccaggctgctaaatcacgtggtcagagtgttgctggagaatggtgcagttgtaaaggctgcaacttatctcgctaaacttgatgcaaaacagctttcacttgaagcttcgacagtttcgttaattgtatctctcttctcaaggaaagggaaattaagggagcatgtaaagttgcttccggtaaagtaccagcctcctgagatgttggac

SEQ ID NO: 1785 - DNA, 2316 bp, Triticum aestivum; identical to SEQ ID NO: 1782

SEQ ID NO: 1786 - DNA, 2316 bp, Triticum aestivum; identical to SEQ ID NO: 1784

SEQ ID NO: 1787 - DNA, 2316 bp, Triticum aestivum; identical to SEQ ID NO: 1782

SEQ ID NO: 1788 - DNA, 2316 bp, Triticum aestivum
atgccaaccgcccgcctgtcctccatcttcacctcctccttcaaggctccttcacgagagcgccgagctcccctcgccgccttggctgccgccacggagcgcgtccgcgccggaacgctaagtcggcaggatgcgcaccacctgttcgacgaattgctgagccaagccgcgacagtcccagtacgcacgctcaacaattttcttgccgccctcgcccgtgcaccaccctcagctgcctgtggcaatggcccggcccttgccgtcaccctcttcaacggcatgtcccgaggcgctggtgcacgggtggtgtcgcccacgtgctgtacctattccatcctcatggactgctgctgccgtgcaggccgcccggacctggtggttgccttcttcggccgcctccttaggttggggctgcgcttgaatgtcatctccttgagcaatctcctcaaggggctctgccaggccaagcgtacaaatgaggcggtggacttgctgctccaccggacacctgaactggactgtgtgcctgatgtcttctcgtacagcatagtaatcaacggctgtttaaaagaaggtgaagtagacaaagcgtgcaatctcttccatgagatgccccaactgggagttcaacctgatgtggtgacctacacctcaattatcgacgcactaagcaaatccggagccatggtaaaggcagaagtggtccttcggcgaatggttggccaaggcattggaccaaacgtcatgacatatactagcctgatccatggatattccgcttcgggtcagtggaaggcggcagttagagtattcaaggaaatggtaagtgttggtgttctaccaaatgctgtcactttgaactcatttatggattcactttgcaagcatagaaggacaaaggaagctagagttatttttgactccatggctgcaaagggccagaaacctgatattgtctcctactctattatgcttaacgggtatgtgaaagaaggatgctttgatgatatgaccggtctcttcaattcgatgctacagaacggtgttgtacctaaccaccatattttcaacatactgatcaatgcatatgctaaacgtggactgatggatgaggctatgcacatgtttgaagtaatgaggcaacaaggagtgaacccggatgtatttggctatcaaatcataatggattcattttgtaaaatgggtaggatggatgctgctctggacaaatttaatcagatggtcaatcaaggagtttcacctaacaaagctgtttaccaatgcctggttctgggttcttgctctcatggtgattttgtgaaagccaaggaattgatttgtgaagcagttaatagaggtctctgttctaacagtgtgttcttctatcctgtaataaacgacctgtgcaaagaaggaaaggtgaaggaggcacaggatatgtttgacttcattctaggtattggtcagcggcctgatgtgattatgtacaattcactgatggatgggtattgccttgttggcaaggtggaggaagcactgagagtacttgatgctatgaagtctgctggcctccaacctactgctgttacgtatgctatacttcttaatggctactgtaaaattggcaagatcgccgatggattgagtcttttcagggaaatgtcactcagcggggttaagcccacgactattatgtacaacattatacttgatgggctgtttcgctccgggagaacagtttctgcaaaggaaaaattcaatacgatggttgaaagtggcttaccagtggacgttcgcacatacaacatagttcttcatggactttgtagaaacaattgcactggtgaagcaatagagttgttcaaaaaattatgtgcaacgaacgtgaagattaatgtcataacattcaataccatgatttctgcaatgtttaaaactaggagaattggagaagccaaggatttgtttgctactatatcagccatcgggttggtgccttctgttgtgacttacagtgtaatgatgacgaatttcataaaagaagggttgctggcagaggctgatgatatgtttttagcaatggagaaggctggctgtgctcccaactccagactgctaaatcacgtggtcagagcgttgctggaaaaaggtgcagttgtaaaggctgcaacttatctcgctaaacttgatgctaaacagctgtcagttgaagcttcaacaatttcgttaatagtatctctcttctcaggggaagggaaactaagggagcacgtagagttgcttccggtaaagtaccagcctcctgagatgttggac

SEQ ID NO: 1789 - DNA, 2316 bp, Triticum aestivum; identical to SEQ ID NO: 1788

SEQ ID NO: 1790 - DNA, 2316 bp, Triticum aestivum; identical to SEQ ID NO: 1788

SEQ ID NO: 1791 - DNA, 2316 bp, Triticum aestivum; identical to SEQ ID NO: 1788

SEQ ID NO: 1792 - DNA, 2316 bp, Triticum aestivum; identical to SEQ ID NO: 1788

SEQ ID NO: 1793 - DNA, 2316 bp, Triticum aestivum; identical to SEQ ID NO: 1788

SEQ ID NO: 1794 - DNA, 2358 bp, Triticum aestivum
atgcctcgcttctcctccaccacgccgatgtcgccactccgccgccgcctccgcgcccgccactcctcctccacctcccattcctcacgcagctgggagccccacgccgccttcgccgccgccgcggagcgtgcgcgctctggcaacctcaccccggaggacgcacaccacctgttcgacgaattgctcaggcagggcaatcctgtccaggaccgccccttgaacaaacttctctccgccctcgcccgtgctccggcgtccgcggcctgcagaaacggccctgcactcgcggtcgccctcttcagccgcatatcccaaggtgcccgccgacgggtggcggatccaacggcctgcacctacggcatcctcatggactgctgctgccgcgcacaccgcctggatctgacgctggccttcttcggcggtctccttaagacgggacttaaggcaggcgtcattcaagtttgcactcttctcaagggcctctgccgcgcaaagcgggctgatgaggctctggacgtgctgcttcacaggatgcctgagctgggctgcacccccaacgtggtggcatataccacggtcatccacggcttctttaaggaaggccaagtaggcaaggcatgcaatctgttccatggaatggcgcagcagggcgttgcgcctaatttggtgacatataactcggttattgatgcgttgtgcaaggccaaagcaatggacaaggcagagtatttccttggtcagatggttgatgatggtgtcgtacctgataatgtgacatataatagcctcatccatggatattcctcttcaggccattggaaggaggcagttagggtattcaaagagatgacaagtcggagggttacagcagatgtccatacttacaacatgtttatgacctttctttgcaaacatggaagaagcaaagaagctgcaggaatttttgataccatggctctgaagggcctgaaacctgacaacgtttcatatgctattctccttcatgggtatgccaccgtaggatgcttagttgatatgattaatctcttcaattcaatggaaagagattgtattctacctgactgtcgtatcttcaacatactgattaatgcatatgctaaatctgggaagcttgataaggctatgcttatcttcaatgaaatgcagaaacaaggagtgagtccaaatgcagtcacatattcaactgtaatagatgcattttgcaaaaagggtcagttggacgatgctatgataaagtttaatcagatgattgatacaggagtacgacagggcacagctgtttatggttctctaatccagggtttttgtacacacggcgatttggtgaaagcaaaggaattgcttactgaaatgatgaacaaaggtatatctcctcctgatattaagttcttccattcaatcatgcagaaccttggcacggaaggaagggtaatagaagcacgggatgtccttggcttgatagcgcacataggtatgaggcctaatgtttgcacatttaatatactgatcggtggatattgcctagtcggcaagatggaggatgcctcaaaaatatttgatgatatgatgtcatatggcttagaaccttctaatattacgtatggtatacttattaatggctattgcaaaaacgaaaggattaacgatgggttgattctgttcaaagaaatgttgcgcaagggacttaaacctacaacttttaattacaacgtcatactggatggattatttctgactggacgaactgttgctgcaaaggaaaagtttgatgagatggttgaatctggagtaagtgtgtgcattgatacatattcgatagttcttggtggactttgtagaaataattgtagcggcgaagcaatcacgctattccagaaattaagcacaatggatgtgaaattcaatattacaattgtcaatataatgattgatgccttctacagggttcagcgaaaccaagaagccaaggatttgtttgctgcagtatcagccaatggtttggtagctaatgtctttacctacaccataatgatgaaaaatcttataaaagaagggtcagtggaagaagctgacaatctctttttatcaatggagaagagcggctgtactgctgattcttatatgttaaatcttatcgtcagaatgttactggaaaaaggagagctagtcaaggctgggaattatatgtctaaagttgatgcaatgagctactcacttgaagctgaaaccgtttcgctgcttatctctctcttttcggggaaagggaaatatagagaacacataggattgctccctgcaaagtatcggtttcgtgaagaagcagccacagttgtg

SEQ ID NO: 1795 - DNA, 1509 bp, Triticum aestivum
atgacaagtcggagggttacagcagatgtgcatacttacaacatgtttatgacctttctttgcaaacatggaagaagcaaagaagctgcaggaatttttgataccatggctatgaagggcctgaaacctgacaacgtttcatatgctattctccttcatgggtatgccaccgaaggatgcttagttgatatgattaatctcttcaattcaatggaaagagattgtattctacctgactgtcgtatcttcaacatactgattaaagcatatgctaaatctgggaagcttgataaggctatgcttatcttcaatgaaatgcagaaacaaggagcgagtccagatgcagtcacgtattcaactgtaatagatgcattttgcaaaaagggtcagttggacgatgctatgataaagtttaatcagatgattgatacaggagtaccacagggcacagctgtttatggttctctaatccagggtttttgtacacacggcgatttggtgaaagcaaaggaattggttactgaaatgatgaacaaaggtatacctcctcctgatattaagttcttccattcaatcatgcagaacctttgcacagaaggaagggtaatagaagcacgggatgtccttggcttgatagcgcacataggtatgaagcctaatgtttgcacatttaatatactgagcggtggatattgcctagtcggcaagatggaggatgcctcaaaaatatttgatgatatgatgtcatatggcttagaaccttctaatattacgtatggtatacttattaatggctattgcaaaaacgaaaggattaacgatgggttgattctgttcaaagaaatgttgtgcaagggacttaaacctacaacttttaattacaacgtcatactggatggattatttctaactggacgaactgttgctgcaaaggaaaagtttgatgagatggttgaatctggagtaagtgtgtgcattgatacatattcgatagttcttggtggactttgtagaaataattgtagcggcgaagcaatcatgctattccagaaattaagcacaatggatgtgaaattcaatattacaattgtcaatataatgattgatgccttctacagggttcagcgaaaccaagaagccaaggatttgtttgctgcagtatcagccaatggtttggtagctaatgtctttacctacaccataatgatgaaaaatcttataaaagaagggtcagtggaagaagctgacgatctctttttatcaatggagaagagcggctgtactgctgactcttatatgttaaatcttatcgtcagaatgttactggaaaaaggagagctagtcaaggctgggaattatatgtctaaagttgatgcaatgagctactcacttgaagctgaaaccgtttcgctgcttatctctctcttttcagggaaagggaaatatagagaacacataggattgctccctgcaaagtatcagtttcgtgaagaagcagccacaattgtg

SEQ ID NO: 1796 - DNA, 2358 bp, Triticum aestivum
atgcctcgcttctcctccaccacgccgatgtcgccactccgccgccgcctccgcgcccgccactcctcctccacctcccattcctcacgcagctgggagccccacgccgccttcgccgccgccgcggagcgtgcgcgctctggcaacctcaccccggaggacgcacaccacctgttcgacgaattgctcaggcagggcaatcctgtccaggaccgccccttgaacaaacttctctccgccctcgcccgtgctccggcgtccgcggcctgcagaaacggccctgcactcgcggtcgccctcttcagccgcatatcccaaggtgcccgccgacgggtggcggagccaacggcctgcacctacggcatcctcatggactgctgctgccgcgcacaccgcctggatctgacgctggccttcttcggcggtctccttaagacgggacttaaggcaggcgtcattcaagtttgcactcttctcaagggcctctgccgcgcaaagcgggctgatgaggctctcgacgtgctgcttcacaggatgcctgagctgggctgcacccccaacgtggtggcatataccacggtcatccacggcttctttaaggaaggccaagtaggcaaggcatgcaatctgttccatggaatggcgcagcagggcgttgcgcctaatttggtgacatataactcggttattgatgcgttgtgcaaggccaaagcaatggacaaggcagagtatttccttggtcagatggttgatgatggtgtcgtacctgataatgtgacatataatagcctcatccatggatattcctcttcaggccattggaaggaggcagttagggtattcaaagagatgacaagtcggagggttacagcagatgtccatacttacaacatgtttatgacctttctttgcaaacatggaagaagcaaagaagctgcaggaatttttgataccatggctctgaagggcctgaaacctgacaacgtttcatatgctattctccttcatgggtatgccaccgaaggatgcttagttgatatgattaatctcttcaattcaatggaaagagattgtattctacctgactgtcgtatcttcaacatactgattaatgcatatgctaaatctgggaagcttgataaggctatgcttatcttcaatgaaatgcagaaacaaggagtgagtccaaatgcagtcacatattcaactgtaatagatgcattttgcaaaaagggtcagttggacgatgctatgataaagtttaatcagatgattgatacaggagtacgacagggcacagctgtttatggttctctaatccagggtttttgtacacacggcgatttggtgaaagcaaaggaattgcttactgaaatgatgaacaaaggtttatctcctcctgatattaagttcttccattcaatcatgcagaaccttggcacggaaggaagggtaatagaagcgcgggatgtccttggcttgatagcgcacataggtatgaggcctaatgtttgcacatttaatatactgatcggtggatattgcctagtcggcaagatggaggatgcctcaaaaatatttgatgatatgatgtcatatggcttagaaccttctaatattacgtatggtatacttattaatggctattgcaaaaacgaaaggattaacgatgggttgattctgttcaaagaaatgttgcgcaagggacttaaacctacaacttttaattacaacgtcatactggatggattatttctgactggacgaactgttgctgcaaaggaaaagtttgatgagatggttgaatctggagtaagtgtgtgcattgatacatattcgatagttcttggtggactttgtagaaataattgtagcggcgaagcaatcacgctattccagaaattaagcacaatggatgtgaaattcaatattacaattgtcaatataatgattgatgccttctacagggttcagcgaaaccaagaagccaaggatttgtttgctgcagtatcagccaatggtttggtagctaatgtctttacctacaccataatgatgaaaaatcttataaaagaagggtcagtggaagaagctgacaatctctttttatcaatggagaagagcggctgtactgctgattcttatatgttaaatcttatcgtcagaatgttactggaaaaaggagagctagtccaggctgggaattatatgtctaaagttgatgcaatgagctactcacttgaagctgaaaccgtttcgctgcttatctctctcttttcggggaaagggaaatatagagaacacataggattgctccctgcaaagtatcggtttcgtgaagaagcagccacagttgtg

SEQ ID NO: 1797 - DNA, 2364 bp, Triticum aestivum
atgcctcgcttctcctccaccacgccgctgtcgccactccgcctccgccgccgcctccgcgcccgccactcctcctccacctcccattcctcacgcagctgggagccccacgccgccttcgccgccgccgcggagcgtgcgcgctctggcaacctcaccccggaggacgcacaccacctgttcgacgaattgctccggcagggcaatcctgtccaggaccgccccttgaacaaacttctctccgccctcgcccgtgctccggcgtccgcgacctgcagaaacggccctgcactcgcggtcgccctcttcagccgcatatcccaaggtgcccgccgacgtgtggcagagccaacggcctgcacctacggcatcctcatggactgctgctgccgcgcacaccgcctcgatctggtgttcgctttcttcggccgtctcctcaggacgggacttaaggcaggcgtcattcaagtttgcactcttctcaagggcctctgccgcgcaaagcgggctgatgaggctctcgacgtgctgcttcacaggatgcctgagctgggctgcactcccaacgtggtggcatataccacggtcatccacggcttctttaaggaaggccaagtaggcaaggcatgcaatctgttccatggaatggcgcagcagggcgttgcgcctaatttggtgacatataactcggttattgatgcgttgtgcaaggccaaagcaatggacaaggcagagtatttccttggtcagatggttgatgatggtgtcgtacctgataatgtgacatataatagcctcatccatggatattcctcttcaggccactggaaggaggcagttagggtattcaaagagatgacaagtcggagggttacagcagatgtgcatacttacaacatgtttatgacctttctttgcaaacatggaagaagcaaagaagctgcaggaatttttgataccatggctatgaagggcctgaaacctgacaacgtttcatatgctattctccttcatgggtatgccaccgaaggatgcttagttgatatgattaatctcttcaattcaatggaaagagattgtattctacctgactgtcgtatcttcaacatactgattaatgcatatgctaaatctgggaagcttgataaggctatgcttatcttcaatgaaatgcagaaacaaggagcgaatccagatgcagtcacgtattcaactgtaatagatgcattttgcaaaaagggtcagttggacgatgctatgataaagtttaatcagatgattgatacaggagtaccacagggcacagctgtttatggttctctaatccagggtttttgtacacacggcgatttggtgaaagcaaaggaattggttactgaaatgatgaacaaaggtatacctcctcctgatattaagttcttccattcaatcatgcagaacctttgcacagaaggaagggtaatagaagcacgggatgtccttggcttgatagcgcacataggtatgaagcctaatgtttgcacatttaatatactgagcggtggatattgcctagtcggcaagatggaggatgcctcaaaaatatttgatgatatgatgtcatatggcttagaaccttctaatattacgtatggtatacttattaatggctattgcaaaaacgaaaggattaacgatgggttgattctgttcaaagaaatgttgtgcaagggacttaaacctacaacttttaattacaacgtcatactggatggattatttctaactggacgaactgttgctgcaaaggaaaagtttgatgagatggttgaatctggagtaagtgtgtgcattgatacatattcgatagttcttggtggactttgtagaaataattgtagcggcgaagcaatcatgctattccagaaattaagcacaatggatgtgaaattcaatattacaattgtcaatataatgattgatgccttctacagggttcagcgaaaccaagaagccaaggatttgtttgctgcagtatcagccaatggtttggtagctaatgtctttacctacaccataatgatgaaaaatcttataaaagaagggtcagtggaagaagctgacgatctctttttatcaatggagaagagcggctgtactgctgactcttatatgttaaatcttatcgtcagaatgttactggaaaaaggagagctagtcaaggctgggaattatatgtctaaagttgatgcaatgagctactcacttgaagctgaaaccgtttcgctgcttatctctctcttttcagggaaagggaaatatagagaacacataggattgctccctgcaaagtatcagtttcgtgaagaagcagccacaattgtg

SEQ ID NO: 1798 - DNA, 2469 bp, Triticum aestivum
atgtcccgcctccgcctccgccactgctccaccacgcccatgtcccgcctccgccgccgccgccgcctctcctcttccacctcacgacccacaccctcctggtctccccgcgccgcctttgcggcggccacggagcgcgtccgcgacggaacgctcggccctcaagacgcacaccacctgttcgacgaattgtttcagcaggccaccccggtccccgagcgccccctcaacggattccttgccgccctcacccgtgccacgccctccgaggcctgcagagacggccccgccctcgccctctccctcttcaaccgtgtctgccgagaagaagccggcatgcgggtggcgccgcccaccatcttcacctacggcgtcctcatgaactgctgctgcaacacgcgtcgtccggaacttgggctcgccttcttcggccgcctcctaaggacgggcctgaaggcagacaagaccgtcgccaacactgtcctcaagtgcctgtgctgcgctaaacggacagacgacgctgtgaaagtgctgcttcataggatgaccgagctggggtgtgtgcctgatgccttctcatacgccattgtcctgaagagcttatgtgatgataacaggagccagcaggcgctcgacctgctccggatgatggcgaaagaagaaggtgtgtgctcccctgacgtggtcacatataacacggtcatccacggcttctttaaggaaggaaaaataggcaaggcatgcaatctattccatgaaatgacgaagcaagggtttgtgcctaatgtggtgacatataactcggttatcaatgcattgtgcaaggcccgagcaatggacaatgcagagttgttccttcggcagatggttgataacggcgttcaaccgaataaagtgacatatactagcatgatccatggatattccactttgggccggtggaaagaggcgactaaactgttcagagaaatgacaagcagtggtcttataccagatattgtcacttggaactcgttcattgactccctttgcaagcatggaagaagcaaagaagctgctgaaatttttgattccatggctgccaagggccacagacctaatattgttacgtatggcattctgctccacgggtatgcaagggaaggatgctttgctgatatgatgagtctctttaattcaatggaaggcgacggtattgtagccaactgccttgttttcaccattttaattgatgcatatgctaaacgaggaatgatggatgaagctatgctcatacttactgaaatgcagggacaaggactgagtccggatgtattcacctattcaactctaatatctgcactttgcagaaaggggaggctcgctgatgctatggataagttaagtgagatgattggtacgggagtacaaccgaatacagttgtttatcactccctaattcagggtttctgtacacatggcgatctggtgaaagcaaaggagttggtttatgaaatgatgaccaaaggtattccttgtccaaacactgcattcttcagttcaatagtacacagtctatgcaaagaaggaagggttatggatgcacaccatatctttgacttggttaaagacataggggagagatctgacatcattatgtttaatacgctgattgatggatattgcctagtcggtgagatgggcaaagcattcagtgtactagatgtcatgatatcagccggcattgagcctgacatctttacatataatacacttgtcaatggttattttaagagtggaaggatcgatgatgggttgaatctgttcagagaaatgtcacataaggaaattaaacctacaactgttacatataacatcatactggatggattatttcgtgctgggagaacagttgctgccaagaaaatgctccatgagatgatcggatgtggaacaacagtgagcttgtccacatacaccataattcttagaggactttgtagaaataattgcaccgacgaagcaatcgtcatgttccagaaattacgcacaattaatgtaaagttcaatatcacaacactcaataccatgattaattcaatgtacacggttcagagaagagaagaagctaaagatttgtttgctgcaatatcagacagcgggttggtgcccaatgcctctacatacggcataatgatacgaaatcttctaaaagaaggatcagtggaagaagctgacaatatgttctcatcaatggagaagagtggttgtgctccttgctctcgtcttttaaatgataccattagaacgttattggagaagggggaaatagtcaaggccggaaattatatgtctaaagttgatggcaagagcatctcacttgaagcttcaactagttcattgttgttgtctctgttttctgggaaaggtaaatatcgtgaacaaatacaattgctccctgtaaagtaccaattctttgatggagttagt

SEQ ID NO: 1799 - DNA, 2469 bp, Triticum aestivum
atgtcccgcctccgcctccgccactgctccaccacgcccatgtcccgcctccgccgccgccgccgcctctcctcttccacctcacgacccacaccctcctggtctccccgcgccgcctttgcggcggccacggagcgcgtccgcgacggaacgctcggccctcaagacgcacaccacctgttcgacgaattgtttcagcaggccaccccggtccccgagcgccccctcaacggattccttgccgccctcacccgtgccacgccctccgaggcctgcagagacggccccgccctcgccctctccctcttcaaccgtgtctgccgagaagaagccggcatgcgggtggcgccgcccaccatcttcacctacggcgtcctcatgaactgctgctgccacacgcgtcgtccggaacttgggctcgccttcttcggccgcctcctaaggacgggcctgaaggcagacaagaccgtcgccaacactgtcctcaagtgcctgtgctgcgctaaacggacagacgacgctgtgaaagtgctgcttcataggatgaccgagctggggtgtgtgcctgatgccttctcatacgccattgtcctgaagagcttatgtgatgataacaggagccagcaggcgctcgacctgctccggatgatggcgaaagaagaaggtgtgtgctcccctgacgtggtcacatataacacggtcatccacggcttctttaaggaaggaaaaataggcaaggcatgcaatctattccatgaaatgacgaagcaagggtttgtgcctaatgtggtgacatataactcggttatcaatgcattgtgcaaggcccgagcaacggacaatgcagagttgttccttcggcagatggttgataacggcgttcaaccgaataaagtgacatatactagcatgatccatggatattccactttgggccggtggaaagaggcgactaaactgttcagagaaatgacaagcagtggtcttataccagatattgtcacttggaactcgttcattgactccctttgcaagcatggaagaagcaaagaagctgctgaaatttttgattccatggctgccaagggccacagacctaatattgttacgtatggcattctgctccacgggtatgcaagggaaggatgctttgctgatatgatgagtctctttaattcaatggaaggcgacggtattgtagccaactgccttgttttcaccattttaattgatgcatatgctaaacaaggaatgatggatgaagctatgctcatacttactgaaatgcagggacaaggactgagtccggatgtattcacctattcaactctaatatctgcactttgcagaaaggggaagctcgctgatgctatggataagttaagtgagatgattggtacgggagtacaaccgaatacagttgtttatcactccctaattcagggtttctgtacacatggcgatctggtgaaagcaaaggagttggtttatgaaatgatgaccaaaggtattccttgtccaaacactgcattcttcagttcaatagtacacagtctatgcaaagaaggaagggttatggatgcacaccatatctttgacttggttaaagacataggggagagatctgacatcattatgtttaatacgctgattgatggatattgcctagtcggtgagatgggcaaagcattcagtgtactagatgtcatgatatcagccggcattgagcctgacatctttacatataatacacttgtcaatggttattttaagagtggaaggatcgatgatgggttgaatctgttcagagaaatgtcacataaggaaattaaacctacaactgttacatataacatcatactggatggattatttcgtgctgggagaacagttgctgccaagaaaatgctccatgagatgatcggatgtggaacaacagtgagcttgtccacatacaccataattcttagaggactttgtagaaataattgcaccgacgaagcaatcgtcatgttccagaaattacgcacaattaatgtaaagttcaatatcacaacactcaataccatgattaattcaatgtacacggttcagagaagagaagaagctaaagatttgtttgctgcaatatcagacagcgggttggtgcccaatgcctctacatacggcataatgatacgaaatcttctaaaagaaggatcagtggaagaagctgacaatatgttctcatcaatggagaagagtggttgtgctccttgctctcgtcttttaaatgataccattagaacgttattggagaagggggagatagtcaaggccggaaattatatgtctaaagttgatggcaagagcatctcacttgaagcttcaactagttcattgttgttgtctctgttttctgggaaaggtaaatatcgtgaacaaatacaattgctccctgtaaagtaccaattctttgatggagttagt

SEQ ID NO: 1800 - DNA, 2469 bp, Triticum aestivum; identical to SEQ ID NO: 1798

SEQ ID NO: 1801 - DNA, 2469 bp, Triticum aestivum; identical to SEQ ID NO: 1798

SEQ ID NO: 1802 - DNA, 2469 bp, Triticum aestivum; identical to SEQ ID NO: 1799

SEQ ID NO: 1803 - DNA, 2469 bp, Triticum aestivum
atgtcccgcctccgcctccgccactgctccaccacgcccatgtcccgcctccgccgccgccgccgcctctcctcttccacctcacgacccacaccctcctggtctccccgcgccgcctttgcggcggccacggagcgcgtccgcgacggaacgctcggccctcaagacgcacaccacctgttcgacgaattgtttcagcaggccaccccggtccccgagcgccccctcaacggattccttgccgccctcacccgtgccacgccctccgaggcctgcagagacggccccgccctcgccctctccctcttcaaccgtgtctgccgagaagaagccggcatgcgggtggcgccgcccaccatcttcacctacggcgtcctcatgaactgctgctgccacacgcgtcgtccggaacttgggctcgccttcttcggccgcctcctaaggacgggcctgaaggcagacaagaccgtcgccaacactgtcctcaagtgcctgtgctgcgctaaacggacagacgacgctgtgaaagtgctgcttcataggatgaccgagctggggtgtgtgcctgatgccttctcatacgccattgtcctgaagagcttatgtgatgataacaggagccagcaggcgctcgacctgctccggatgatggcgaaagaagaaggtgtgtgctcccctgacgtggtcacatataacacggtcatccacggcttctttaaggaaggaaaaataggcaaggcatgcaatctattccatgaaatgacgaagcaagggtttgtgcctaatgtggtgacatataactcggttatcaatgcattgtgcaaggcccgagcaacggacaatgcagagttgttccttcggcagatggttgataacggcgttcaaccgaataaagtgacatatactagcatgatccatggatattccactttgggccggtggaaagaggcgactaaactgttcagagaaatgacaagcagtggtcttataccagatattgtcacttggaactcgttcattgactccctttgcaagcatggaagaagcaaagaagctgctgaaatttttgattccatggctgccaagggccacagacctaatattgttacgtatggcattctgctccacgggtatgcaagggaaggatgctttgctgatatgatgagtctctttaattcaatggaaggcgacggtattgtagccaactgccttgttttcaccattttaattgatgcatatgctaaacgaggaatgatggatgaagctatgctcatacttactgaaatgcagggacaaggactgagtccggatgtattcacctattcaactctaatatctgcactttgcagaaaggggaagctcgctgatgctatggataagttaagtgagatgattggtacgggagtacaaccgaatacagttgtttatcactccctaattcagggtttctgtacacatggcgatctggtgaaagcaaaggagttggtttatgaaatgatgaccaaaggtattccttgtccaaacactgcattcttcagttcaatagtacacagtctatgcaaagaaggaagggttatggatgcacaccatatctttgacttggttaaagacataggggagagatctgacatcattatgtttaatacgctgattgatggatattgcctagtcggtgagatgggcaaagcattcagtgtactagatgtcatgatatcagccggcattgagcctgacatctttacatataatacacttgtcaatggttattttaagagtggaaggatcgatgatgggttgaatctgttcagagaaatgtcacataaggaaattaaacctacaactgttacatataacatcatactggatggattatttcgtgctgggagaacagttgctgccaagaaaatgctccatgagatgatcggatgtggaacaacagtgagcttgtccacatacaccataattcttagaggactttgtagaaataattgcaccgacgaagcaatcgtcatgttccagaaattacgcacaattaatgtaaagttcaatatcacaacactcaataccatgattaattcaatgtacacggttcagagaagagaagaagctaaagatttgtttgctgcaatatcagacagcgggttggtgcccaatgcctctacatacggcataatgatacgaaatcttctaaaagaaggatcagtggaagaagctgacaatatgttctcatcaatggagaagagtggttgtgctccttgctctcgtcttttaaatgataccattagaacgttattggagaagggggagatagtcaaggccggaaattatatgtctaaagttgatggcaagagcatctcacttgaagcttcaactagttcattgttgttgtctctgttttctgggaaaggtaaatatcgtgaacaaatacaattgctccctgtaaagtaccaattctttgatggagttagt

SEQ ID NO: 1804 - DNA, 2457 bp, Triticum aestivum
atgccccgcctccgtcgcttctccaccatgccgatgctccacctcctccgccgcagctcctcctccacctccacctcgccgcccttgcgttcctggtctccccacgccgcctttgccgccgccacggagcgtgtccgtgccggggcgctcagccctgaagacgcgcaccacctgttcgacgaattgctacggcaggccaccccggtccccgagcgctccctcaacggcttccttgccgccctcgcccgtgcgcccgcctcggccgcctgcattagagatggccccgcccttgccgtcgctctcttcaaccgcgtgtgccgagaagaagccggcctgcaggtggcagcgcccacagtttgcacctacaacatcctcatgggctgctgctgccgcgtgcatcgcccggacctagggcttgccttctttggtcgtctcctcaggacaggcctgaagacagaacagatcactgccaacaccttcctcaagtgcctctgctacgccaaacggacggaagaggctgtgaacatgctgcttcatgggatgtccgagctcggctgtgtgccggatgcaatctcatactccattgttctgaagagcttatgcgagaatagcatgagtcagcgggcattcgacctgctccacagcgggcactcgacctgctctttcagtgtggtggcatatagcacagtcatccatggctttttcaaagaaggcaaaacaggcaaggcatgcaatctattccatgaaatgatacatcaaggggttgatcctgatgtggtgacgtgcaactcgatcattaatgcattgtgcaaggccagagcaatggacaaggcagagctagtccttcggcagatggtcgataaaggtgttcagcccaatacagtgacttataattgcatgattcatggatattccacgtcagggcggttgaaagaggctgttaaaatgttgacagaaatgacaagccgtggtcttataccagatattgttacttacaattcgttgatgacttcccttagcaagcatcgaagaagcaaagaagcggcagaaatattttattccatgactgccaagggccacaaaccgaatgctgcctcgcaccgtattttgcttaatgggtatgccactgagggatgctttgctgatatgattgatctcttcaactcaatggaaagcaatggttttgtagccgactgccatgttttcaccatattaattgatgcatatgctaaacgtggaatgatggatgaagctatgctcatatttactgaaatgcgggaaaaaggagtgagtcccgatgtattcacctattacactgtaatagccgcactttgcagattgggtaggctggccgatgctatggacaggttcaatgagatgactgatatgggtgttcagccgaacacagttgtttatcactccctaattcagggtttttgtatgcttggtgatttggttaaagctaaggagttggtgtctgaaatgatgaacaaaggtattcctcgtcctgacattgcgttcttcagttcaataataaacagtctatgcaaagaaggaagagttatggatgcacaagatatctttgaattggttataagcatagatgagagacctgacgtcattacatttaactcactgattgatggatatggcttaattggccagatggataaagcatttggagtgcttgatgccatggtatcagctggcattgagcctaatgttgttacgtatagttcacttcttgatggctattgtagaaatggaaggatcgatgatgctttgattctattcagagaaatgccgcgcaagagaattaaacctaacactgttacatatggcatcatactgcatgggttgttccgtgctgggagaactgttgctgcaaggaaaatgttcgatgagatgatcgaagggggtataccagtgagcatttccatatacaatataatacttggaggtctttgtagaaataattgtgcagacgaagcaatcacactatttcagaaattaggagcaatgaatgtcaagttcgatattataacactcaataccatgattaatgcaatgttcaaggttcggagaagagaagaagctaatgatttgtttgctgcaatatcagccagtgggttggtgcctaatgcttctacttacggcataatgatagaaaatattctaaaagaaggatcagtggaagaagttgacaatatgttttcatcaatggagaagagtggttgtgctcccagctctcgtcttataaattgtatcatcagaatgttgttggaaaaaggtgagattgccagggctgggaattatttatctaaagttgatgggaagatcatctcacttgaagcttcaactacttctttgttgttgtctctcttttcaagggaagggaaatatcgggaaaacattgaattgcttcctgcaaagtatcaatttttcattggatttggt

SEQ ID NO: 1805 - DNA, 1710 bp, Triticum aestivum
atgatacatcaaggggttgatcctgatgtggtgacgtacaactcgatcattgatggattgtgcaaggccagagcaatggacaaggcagagctagtccttcggcagatggtcgataaaggtgttcaacccaatacagtgacatataattgcatgattcatggatattccacatcagggcggttgaaagaggctgttaaaatgttgacagaaatgacaagccgtggtcttataccagatattgttacttacaattcgttgatgacttccctttgcaagcatggaagaagcaaagaagtggcagaaatattttattccatgactgccaagggccacaaaccgaatgctgcctcgtaccgtattttgcttaatgggtatgccactgagggatgctttgctgatatgattgatctcttcaactcaagggaaagcaatagttttgtatccgactgccatgttttcaccatattaattgatgcatatgctaaacgtggaatgatggatgaagctatgctcatatttactgaaatgcgggaaaaaggagtgagtcccgatgtattcacctattacactgtaatagccgcactttgcagattgggtaggctggccgatgctatggacaggttcaatgagatgactgatatgggtgttcagccgaacacagttgtttatcactccctaattcagggtttttgtatgcttggtgatttggttaaagctaaggagttggtgtctgaaatgatgaacaaaggtattcctcgtcctgacattgcattcttcagttcaataataaacagtctatgcaaagaaggaagagttatggatgcacaagatatctttgaattggttataagcatagatgagagacctgacgtcattacatttaactcactgattgatggatatggcttaattggccagatggataaagcatttggagtgcttgatgccatggtatcagctggcattgagcctaatgttgttacgtatagttcacttcttgatggctattgtagaaatggaaggatcgatgatgctttgattctattcagagaaatgccgcgcaagagaattaaacctaacactgttacatatggcatcatactggatgggttgttccgtgctgggagaactgttgctgcaaggaaaatgttcgatgagatgatcgaagggggtataccagtgagcatttccatatacaatataatacttggaggtctttgtagaaataattgtgcagacgaagcaatcacactattccagaaattaggagcaatgaatgtcaagttctatattataacactcaataccatgattaatgcaatgttcaaggttcggagaagagaagaagctaacgatttgtttgctgcaatatcagccagtgggttggtgcctaatgcttctacttacggcataatgatagaaaatattctaaaagaaggatcagtggaagaagttgacaatatgttttcatcaatggagaagagtgattgtgctcccagctctcgtcttataaattatatcatcagaatgttgttggaaaaaggtgagattgccagggccgggaattatttatctaaagttgatgggaagatcatctcacttgaagcttcaactacttctttgttgttgtctctcttttcaagggaagggaaatatcgggaaaacattgaattgcttcctgcaaagtatcaatttttcaatggatttggt

SEQ ID NO: 1806 - DNA, 1710 bp, Triticum aestivum; identical to SEQ ID NO: 1805

SEQ ID NO: 1807 - DNA, 1191 bp, Triticum aestivum
atgatacatcaaggggttgatcctgatgtggtgacgtacaactcgatcattgatggattgtgcaaggccagagcaatggacaaggcagagctagtccttcggcagatggtcgataaaggtgttcaacccaatacagtgacatataattgcatgattcatggatattccacatcagggcggttgaaagaggctgttaaaatgttgacagaaatgacaagccgtggtcttataccagatattgttacttacaattcgttgatgacttccctttgcaagcatggaagaagcaaagaagcggcagaaatattttattccatgactgccaagggccacaaaccgaatgctgcctcgtaccgtattttgcttaatgggtatgccactgagggatgctttgctgatatgattgatctcttcaactcaatgaaaagcaatggttttgtagctgactgccatgttttcaccatattaattgatgcatatgctaaacgtggaatgatggatgaagctatgctcatatttactgaaatgcgggaaaaaggagtgagtcccgatgtattcacctattacactgtaatagccgcactttgcagattgggtaggctggccgatgctatggacaggttcaatgagatgactgatatgggtgttcagccgaacacagttgtttatcactccctaattcagggtttttgtatgcttggtgatttggttaaagctaaggagttggtgtctgaaatgatgaacaaaggtattcctcgtcctgacattgcattcttcagttcaataataaacagtctatgcaaagaaggaagagttatggatgcacaagatatctttgaattggttataagcatagatgagagacctgacgtcattacatttaactcactgattgatggatatggcttaattggccagatggataaagcatttggagtgcttgatgccatggtatcagctggcattgagcctaatgttgttacgtatagttcacttcttgatggctattgtagaaatggaaggatcgatgatgctttgattctattcagagaaatgccgcgcaagagaattaaacctaacactgttacatatggcatcatactggatgggttgttcagtgctgggagaactgttgctgcaaggaaaatgttcgatgagatgatcgaagggggtaagcccagctcacgctgc

SEQ ID NO: 1808 - DNA, 2457 bp, Triticum aestivum
atgccccgcctccgtcgcttctccaccatgccgatgctccacctcctccgccgcagctcctcctccacctccacctcgccgcccttgcgttcctggtctccccacgccgcctttgccgccgccacggagcgtgtccgtgccggggcgctcagccctgaagacgcgcaccacctgttcgacgaattgctacggcaggccaccccggtccccgagcgctccctcaacggcttccttgccgccctcgcccgtgcgcccgcctcggccgcctgcattagagatggccccgcccttgccgtcgctctcttcaaccgcgtgtgccgagaagaagccggcctgcaggtggcagcgcccacagtttgcacctacaacatcctcatgggctgctgctgccgcgtgcatcgcccggacctagggcttgccttctttggtcgtctcctcaggacatgcctgaagacagaacagatcactgccaacaccttcctcaagtgcctctgctacgccaaacggacggaagaggctgtgaacatgctgcttcatgggatgtccgagctcggctgtgtgccggatgcaatctcatactccattgttctgaagagcttatgcgagaatagcatgagtcagcgggcattcgacctgctccacagcgggcactcgacctgctctttcagtgtggtggcatatagcacagtcatccatggcttttttaaagaaggcaaaacaggcaaggcatgcaatctattccatgaaatgatacatcaaggggttgatcctgatgtggtgacgtacaactcgatcattaatgcattgtgcaaggccagagcaatggacaaggcagagctagtccttcggcagatggtcgataaaggtgttcagcccaatacagtgacttataattgcatgattcatggatattccacgtcagggcggttgaaagaggctgttaaaatgttgacagaaatgacaagccgtggtcttataccagatattgttacttacaattcgttgatgacttcccttagcaagcatcgaagaagcaaagaagcggcagaaatattttattccatgactgccaagggccacaaaccgaatgctgcctcgtaccgtattttgcttaatgggtatgccactgagggatgctttgctgatatgattgatctcttcaactcaatggaaagcaatggttttgtagccgactgccatgttttcaccatattaattgatgcatatgctaaacgtggaatgatggatgaagctatgctcatatttactgaaatgcgggaaaaaggagtgagtcccgatgtattcacctattacactgtaatagccgcactttgcagattgggtaggctggccgatgctatggacaggttcaatgagatgactgatatgggtgttcagccgaacacagttgtttatcactccctaattcagggtttttgtatgcttggtgatttggttaaagctaaggagttggtgtctgaaatgatgaacaaaggtattcctcgtcctgacattgcgttcttcagttcaataataaacagtctatgcaaagaaggaagagttatggatgcacaagatatctttgaattggttataagcatagatgagagacctgacgtcattacatttaactcactgattgatggatatggcttaattggccagatggataaagcatttggagtgcttgatgccatggtatcagctggcattgagcctaatgttgttacgtatagttcacttcttgatggctattgtagaaatggaaggatcgatgatgctttgattctattcagagaaatgccgcgcaagagaattaaacctaacactgttacatatggcatcatactgcatgggttgttccgtgctgggagaactgttgctgcaaggaaaatgttcgatgagatgatcgaagggggtataccagtgagcatttccatatacaatataatacttggaggtctttgtagaaataattgtgcagacgaagcaatcacactatttcagaaattaggagcaatgaatgtcaagttcgatattataacactcaataccatgattaatgcaatgttcaaggttcggagaagagaagaagctaatgatttgtttgctgcaatatcagccagtgggttggtgcctaatgcttctacttacggcataatgatagaaaatattctaaaagaaggatcagtggaagaagttgacaatatgttttcatcaatggagaagagtggttgtgctcccagctctcgtcttataaattgtatcatcagaatgttgttgggaaaaggtgagattgccagggccgggaattatttatctaaagttgatgggaagatcatctcacttgaagcttcaactacttctttgttgttgtctctcttttcaagggaagggaaatatcgggaaaacattgaattgcttcctgcaaagtatcaatttttcattggatttggt

SEQ ID NO: 1809 - DNA, 1710 bp, Triticum aestivum
atgatacatcaaggggttgatcctgatgtggtgacgtacaactcgatcattgatggattgtgcaaggccagagcaatggacaaggcagagctagtccttcggcagatggtcgataaaggtgttcaacccaatacagtgacatataattgcatgattcatggatattccacatcagggcggttgaaagaggctgttaaaatgttgacagaaatgacaagccgtggtcttataccagatattgttacttacaattcgttgatgacttccctttgcaagcatggaagaagcaaagaagcggcagaaatattttattccatgactgccaagggccacaaaccgaatgctgcctcgtaccgtattttgcttaatgggtatgccactgagggatgctttgctgatatgattgatctcttcaactcaatgaaaagcaatggttttgtagctgactgccatgttttcaccatattaattgatgcatatgctaaacgtggaatgatggatgaagctatgctcatatttactgaaatgcgggaaaaaggagtgagtcccgatgtattcacctattacactgtaatagccgcactttgcagattgggtaggctggccgatgctatggacaggttcaatgagatgactgatatgggtgttcagccgaacacagttgtttatcactccctaattcagggtttttgtatgcttggtgatttggttaaagctaaggagttggtgtctgaaatgatgaacaaaggtattcctcgtcctgacattgcattcttcagttcaataataaacagtctatgcaaagaaggaagagttatggatgcacaagatatctttgaattggttataagcatagatgagagacctgacgtcattacatttaactcactgattgatggatatggcttaattggccagatggataaagcatttggagtgcttgatgccatggtatcagctggcattgagcctaatgttgttacgtatagttcacttcttgatggctattgtagaaatggaaggatcgatgatgctttgattctattcagagaaatgccgcgcaagagaattaaacctaacactgttacatatggcatcatactggatgggttgttccgtgctgggagaactgttgctgcaaggaaaatgttcgatgagatgatcgaagggggtataccagtgagcatttccatatacaatataatacttggaggtctttatagaaataattgtgcagacgaagcaatcacactattccagaaattaggagcaatgaatgtcaagttctatattataacactcaataccatgattaatgcaatgttcaaggttcggagaagagaagaagctaacgatttgtttgctgcaatatcagccagtgggttggtgcctaatgcttctacttacggcataatgatagaaaatattctaaaagaaggatcagtggaagaagttgacaatatgttttcatcaatggagaagagtgattgtgctcccagctctcgtcttataaattatatcatcagaatgttgttggaaaaaggtgagattgccagggccgggaattatttatctaaagttgatgggaagatcatctcacttgaagcttcaactacttctttgttgttgtctctcttttcaagggaagggaaatatcgggaaaacattgaattgcttcctgcaaagtatcaatttttcaatggatttggt

SEQ ID NO: 1810 - DNA, 1710 bp, Triticum aestivum; identical to SEQ ID NO: 1809

SEQ ID NO: 1811 - DNA, 2457 bp, Triticum aestivum; identical to SEQ ID NO: 1804

SEQ ID NO: 1812 - DNA, 2457 bp, Triticum aestivum
atgccccgcctccgtcgcttctccaccatgccgatgctccacctcctccgccgcagctcctcctccacctccacctcgccgcccttgcgttcctggtctccccacgccgcctttgccgccgccacggagcgtgtccgtgccggggcgctcagccctgaagacgcgcaccacctgttcgacgaattgctacggcaggccaccccggtccccgagcgctccctcaacggcttccttgccgccctcgcccgtgcgcccgcctcggccgcctgcattagatatggccccgcccttgccgtcgctctcttcaaccgcgtgtgccgagaagaagccggcctgcaggtggcagcgcccacagtttgcacctacaacatcctcatgggctgctgctgccgcgcgcatcgcccggacctagggcttgccttctttggtcgtctcctcaggacaggcctgaagacagaacagatcactgccaacaccttcctcaagtgcctctgctacgccaaacggacggaagaggctgtgaacgtgctgcttcatgggatgtccgagctcggctgtgtgccggatgcaatctcatactccattgttctgaagagcttatgcgagaatagcatgagtcagcgggcactcgacctgctccacagcgggcactcgacctgctctttcagtgtggtggcatatagcacagtcatccatggcttttttaaagaaggcaaaacaggcaaggcatgcaatctattccatgaaatgatacatcaaggggttgatcctgatgtggtgacgtacaactcgatcattaatgcattgtgcaaggccagagcaatggacaaggcagagctagtccttcggcagatggtcgataaaggtgttcagcccaatacagtgacttataattgcatgattcatggatattccacgtcagggcggttgaaagaggctgttaaaatgttgacagaaatgacaagccgtggtcttataccagatattgttacttacaattcgttgatgacttccctttgcaagcatcgaagaagcaaagaagcggcagaaatattttattccatgactgccaagggccacaaaccgaatgctgcctcgtaccgtattttgcttaatgggtatgccactgagggatgctttgctgatatgattgatctcttcaactcaatggaaagcaatggttttgtagccgactgccatgttttcaccatattaattgatgcatatgctaaacgtggaatgatggatgaagctatgctcatatttactgaaatgcgggaaaaaggagtgagtcccgatgtattcacctattacactgtaatagccgcactttgcagattgggtaggctggccgatgctatggacaggttcaatgagatgactgatatgggtgttcagccgaacacagttgtttatcactccctaattcagggtttttgtatgcttggtgatttggttaaagctaaggagttggtgtctgaaatgatgaacaaaggtattcctcgtcctgacattgcgttcttcagttcaataataaacagtctatgcaaagaaggaagagttatggatgcacaagatatctttgaattggttataagcatagatgagagacctgacgtcattacatttaactcactgattgatggatatggcttaattggccagatggataaagcatttggagtgcttgatgccatggtatcagctggcattgagcctaatgttgttacgtatagttcacttcttgatggctattgtagaaatggaaggatcgatgatgctttgattctattcagagaaatgccgcgcaagagaattaaacctaacactgttacatatggcatcatactgcatgggttgttccgtgctgggagaactgttgctgcaaggaaaatgttcgatgagatgatcgaagggggtataccagtgagcatttccatatacaatataatacttggaggtctttgtagaaataattgtgcagacgaagcaatcacactatttcagaaattaggagcaatgaatgtcaagttcgatattataacactcaataccatgattaatgcaatgttcaaggttcggagaagagaagaagctaatgatttgtttgctgcaatatcagccagtgggttggtgcctaatgcttctacttacggcataatgatagaaaatattctaaaagaaggatcagtggaagaagttgacaatatgttttcatcaatggagaagagtggttgtgctcccagctctcgtcttataaattgtatcatcagaatgttgttggaaaaaggtgagattgccagggccgggaattatttatctaaagttgatgggaagatcatctcacttgaagcttcaactacttctttgttgttgtctctcttttcaagggaagggaaatatcgggaaaacattgaattgcttcctgcaaagtatcaatttttcattggatttggt

SEQ ID NO: 1813 - DNA, 2457 bp, Triticum aestivum; identical to SEQ ID NO: 1804

SEQ ID NO: 1814 - DNA, 2457 bp, Triticum aestivum; identical to SEQ ID NO: 1804

SEQ ID NO: 1815 - DNA, 1395 bp, Triticum aestivum
  misc_feature (50)..(50): n is a, c, g, or t
  misc_feature (52)..(56): n is a, c, g, or t
  misc_feature (59)..(59): n is a, c, g, or t
  misc_feature (61)..(61): n is a, c, g, or t
atgactgccaagggccacaaaccgaatgctgcctcgcaccgtattttgcntnnnnngyntnycactgagggatgctttgctgatatgattgatctcttcaactcaatggaaagcaatggttttgtagccgactgccatgttttcaccatattaattgatgcatatgctaaacgtggaatgatggatgaagctatgctcatatttactgaaatgcgggaaaaaggagtgagtcccgatgtattcacctattacactgtaatagccgcactttgcagattgggtaggctggccgatgctatggacaggttcaatgagatgactgatatgggtgttcagccgaacacagttgtttatcactccctaattcagggtttttgtatgcttggtgatttggttaaagctaaggagttggtgtctgaaatgatgaacaaaggtattcctcgtcctgacattgcrttcttcagttcaataataaacagtctatgcaaagaaggaagagttatggatgcacaagatatctttgaattggttataagcatagatgagagacctgacgtcattacatttaactcactgattgatggatatggcttaattggccagatggataaagcatttggagtgcttgatgccatggtatcagctggcattgagcctaatgttgttacgtatagttcacttcttgatggctattgtagaaatggaaggatcgatgatgctttgattctattcagagaaatgccgcgcaagagaattaaacctaacactgttacatatggcatcatactggatgggttgttccgtgctgggagaactgttgctgcaaggaaaatgttcgatgagatgatcgaagggggtataccagtgagcatttccatatacaatataatacttggaggtctttatagaaataattgtgcagacgaagcaatcacactattccagaaattaggagcaatgaatgtcaagttctatattataacactcaataccatgattaatgcaatgttcaaggttcggagaagagaagaagctaacgatttgtttgctgcaatatcagccagtgggttggtgcctaatgcttctacttacggcataatgatagaaaatattctaaaagaaggatcagtggaagaagttgacaatatgttttcatcaatggagaagagtgattgtgctcccagctctcgtcttataaattatatcatcagaatgttgttggaaaaaggtgagattgccagggccgggaattatttatctaaagttgatgggaagatcatctcacttgaagcttcaactacttctttgttgttgtctctcttttcaagggaagggaaatatcgggaaaacattgaattgcttcctgcaaagtatcaatttttcaatggatttggt

SEQ ID NO: 1816 - DNA, 1710 bp, Triticum aestivum; identical to SEQ ID NO: 1805

SEQ ID NO: 1817 - DNA, 2457 bp, Triticum aestivum; identical to SEQ ID NO: 1804

SEQ ID NO: 1818 - DNA, 1506 bp, Triticum aestivum
atgttggacatcggcgtcgtgaaggatcggcggaggcggaggcggaacaacggggcgaggaatgataccggggaccggaattgctgctgcatggaaacaatgatgccggggcgctccctcaacggcttcctcgccgccctcgcacgtgctacgtcctctgccgcccccgcctgcatcagagatggtcctgtcctcgtcgtcgccctcttcaaccgcttgtgccgagaacaagccgtcgtgcgggtggcgcctctcacagtccacacctacggcatcctcatggactgctgctgccgcacgtctcgcccggacctaggtcttgccttcttcggtcgcctcctcaggacaggcctcaagacaaatgagatcgttgccaccaccttcctcaagtgcctctgctacgcaaaacggacggatgaggctgtgaacgtgctgcttcataggatgcccgagctcggctgtgtgcctgacgccttcgcatactccactgttctgaagagcttatgcgacaatagcatgagtcagcaggggctcgacctgctccatatgatggcgaaagaaggaggtggctgctcccccaacgtggtggcgtatagcacagtcatccatggcttctttaaggaaggtgaaataggcaaggcatgcaatctgttccatgaaatgatgcagcaaggtgttgagcccaatgtgtggacatatagttcaatcattgatgcattgtgcaaggccagagcaatggacaaggcagagctagtgcttcagcagatggttaacaaaggtgttcaacccaataatgtgacatatagttgcatgatccatggatattccacatctgggaggtggaaagaggctgctaaattgctcagagaaatgaaaagccggggccttatactagatattgtcactcgcaactcgttcctggcctccctttgcaagcatgggaggagcaaggaagctgcagaatttcttgattccatgactgccaagggccacaaaccagatatcgtatcatactgtattttgcttcatgggtatggtactgaaggatgcttcgctgatatgattgatgtcttttattcaatggaaagcaacggtattgcagctgactgccatgttttcaacatattaattaatggatatgcaaaacgtggaatgacagaagaagctatgctgatatttactgaaatgcggggacaaggagtaagtccagatgtagtcacctattccattgtaatagcagcactttccagaatgggcaagctgaccgatgctattgagaaattcaatgagatgactgccttggaagtacagccggacacaactgtttatcactcactgattcagggttgttgcatagacggtgatttggttaaagctaaggagctgatgtttgaaatgatgaacggtggtattcctcggcctaacattgtgttcttcaattcagtaataaacagtctgtgcaaagaaggaagggttatggatgcacatgatgtcttagacttgtta

SEQ ID NO: 1819 - DNA, 792 bp, Triticum aestivum
atggataaagcattcaaaatacttgatgtcatggaatcagttggtgttgagcctaatgttgttacttatagtacacttcttgatggctattctaaaaacagaaggattgatgatgctttgactttgtttagagaaatgccgcgtaagagaattaaacctgacactgttacatatggcatcatgttggatgggttgtttcgtgctgggagaactgtcgctgcaatggaaatgttccatgagatgattgaaagtggaacaacagtggacattctcatatacaatataaaacttggaggtctttgtagacataattgtgtagatgaagcgattgcactgttccagaaattgcgagcaatgaatgtgaagttcaatattgaaatactcaataccatgattaatgcaatgtacaaggttcaaagaaaggaagaagcaaaggaattgtttgctacaatatcagccaatgggttggtgcccaatgaatctacttatgcagtaatgataagaaatcttctgaaagacggagcagtggaagatgctgacaatatgttttcatcaatggacaacagtggtatcgttcccagttcccgtcttataaatgatatcatcagaatgttgttggaaaaaggtgagatagccaaggctggaaattatttgtctaaagttgatgggaagagtatctcacttgaagcttcaactacctcattgatgttgtctctcttttcaaggaaagggaaacaccaggaggacattaagttgctccctgcaaagtatcaaatttttgatggatttagt

SEQ ID NO: 1820 - DNA, 2466 bp, Triticum aestivum
atggccgaaattcggccgaaatccacattttgcggccgaaaatcaaaacacacggtgggggtggaggtggaggaggagctgcggcggaggaggcggatgttggacatcggcgtcgtgaaggatcggcggaggcggaggcggaacaacggggcgaggaatgataccggggaccggaattgctgctgcatggaaacaatgatgccggggcgctccctcaacggcttcctcgccgccctcgcacgtgctacgtcctctgccgcccccgcctgcatcagagatggtcctgtcctcgtcgtcgccctcttcaaccgcttgtgccgagaacaagccgtcgtgcgggtggcgcctctcacagtccacacctacggcatcctcatggactgctgctgccgcacgtctcgcccggacctaggtcttgccttcttcggtcgcctcctcaggacaggcctcaagacaaacgagatcaccgccaccaccttcctcaagtgcctctgctacgcaaaacggacggatgaggctgtgaacgtgctgcttcataggatgcccgagctcggctgtgtgcctgacgccttcgcatactccactgttctgaagagcttatgcgacaatagcatgagtcagcaggggctcgacctgctccatatgatggcgaaagaaggaggtggctgctcccccaacgtggtggcgtatagcacagtcatccatggcttctttaaggaaggtgaaataggcaaggcatgcaatctgttccatgaaatgatgcagcaaggtgttgagcccaatgtgtggacatatagttcaatcattgatgcattgtgcaaggccagagcaatggacaaggcagagctagtgcttcagcagatggttaacaaaggtgttcaacccaataatgtgacatatagttgcatgatccatggatattccacatctgggaggtggaaagaggctgctaaattgctcagagaaatgaaaagccggggccttatactagatattgtcactcgcaactcgttcctggcctccctttgcaagcatgggagaagcaaggaagctgcagaatttcttgattccatgactgccaagggccacaaaccagatatcgtatcatactgtattttgcttcatgggtatggtactgaaggatgcttcgctgatatgattgatgtcttttattcaatggaaagcaacggtattgcagctgactgccatgttttcaacatattaattaatggatatgcaaaacgtggaatgacagaagaagctatgctgatatttactgaaatgcggggacaaggagtaagtccagatgtagtcacctattccattgtaatagcagcactttccagaatgggcaagctgaccgatgctattgagaaattcaatgagatgactgccttggaagtacagccggacacaactgtttatcactcactgattcagggttgttgcatagacggtgatttggttaaagctaaggagctgatgtttgaaatgatgaacggtggtattcctcggcctaacattgtgttcttcaattcagtaataaacagtctgtgcaaagaaggaagggttatggatgcacatgatgtcttagacttggttataggcataggtgagaggcctaatgtcattacatttaattcactgattgacggatattgcttagtcgggaacatggataaagcattcaaaatacttgatgtcatggaatcagttggtgttgagcctaatgttgttacttatagtacacttcttgatggctattctaaaaacagaaggattgatgatgctttgactttgtttagagaaatgccgcgtaagagaattaaacctgacactgttacatatggcatcatgttggatgggttgtttcgtgctgggagaactgtcgctgcaatggaaatgttccatgagatgattgaaagtggaacaacagtggacattctcatatacaatataaaacttggaggtctttgtagaaataattgtgtagatgaagcgattgcactgttccagaaattgcgagcaatgaatgtgaagttcaatattgaaatactcaataccatgattaatgcaatgtacaaggttcaaagaaaggaagaagcaaaggaattgtttgctacaatatcagccaatgggttggtgcccaatgaatctacttatgcagtagtgataagaaatcttctaaaaggcggagcagtagaagatgctgacaatatgttttcatcaaaagacaacagtggcatcgttcccagttcccgtcttataaatgatatcatcagaatgttgttggaaaaaggtgagatagccaaggctggcaattatttgtctaaagttgatgggaagagtatctcacttgaagcttcaactgcctcattgatgttgtctctcttttcaaggaaagggaaacatcaggaggatattaagttgctccctgcaaagtatcagttttttgatgggtttggt

SEQ ID NO: 1821 - DNA, 1506 bp, Triticum aestivum; identical to SEQ ID NO: 1818

SEQ ID NO: 1822 - DNA, 792 bp, Triticum aestivum; identical to SEQ ID NO: 1819

SEQ ID NO: 1823 - DNA, 2466 bp, Triticum aestivum; identical to SEQ ID NO: 1820

SEQ ID NO: 1824 - DNA, 2466 bp, Triticum aestivum; identical to SEQ ID NO: 1820

SEQ ID NO: 1825 - DNA, 1506 bp, Triticum aestivum; identical to SEQ ID NO: 1818

SEQ ID NO: 1826 - DNA, 792 bp, Triticum aestivum; identical to SEQ ID NO: 1819

SEQ ID NO: 1827 - DNA, 1176 bp, Triticum aestivum
atgagtcagcaggggctcgacctgctccatatgatggcgaaagaaggaggtggctgctcccccaacgtggtggcgtatagcacagtcatccatggcttctttaaggaaggtgaaataggcaaggcatgcaatctgttccatgaaatgatgcagcaaggtgttgagcccaatgtgtggacatatagttcaatcattgatgcattgtgcaaggccagagcaatggacaaggcagagctagtgcttcagcagatggttaacaaaggtgttcaacccaataatgtgacatatagttgcatgatccatggatattccacatctgggaggtggaaagaggctgctaaattgctcagagaaatgaaaagccggggccttataccagatattgtcactcgcaactcgttcctggcctccctttgcaagcatgggagaagcaaggaagctgcagaatttcttgattccatgactgccaagggccacaaaccagatatcgtatcatactgtattttgcttcatgggtatggtactgaaggatgcttcgctgatatgattgatctctttaattcaatggaaagcaacggtattgcagccgactgccatgttttcaacatattaattaatggatatgcaaaacgtggaatgacagaagaagctatgctgatatttactgaaatgcggggacgagtaagtccagatgtagtcacctattccattgtaatagcagcactttccagaatgggcaagctgaccgatgctattgagaaattcaatgagatgactgccttggaagtacagccggacacaactgtttatcactcactgattcagggttgttgcatagacggtgatttggttaaagctaaggagctgatgtttgaaatgatgaacggtggtattcctcggcctaacattgtgttcttcaattcagtaataaacagtctgtgcaaagaaggaagggttatggatgcacatgatgtcttagacttggttataggcataggtgagaggcctaatgtcattacatttaattcactgattgatggatattgcttagtcgggaacatggataaagcattcaaaatacttgatgtcatggaatcagttggtgttgagcctaatgttgttacttatagtgcaatcttgatggctattctaaaaacagaaggattgatgatgctt

SEQ ID NO: 1828 - DNA, 2307 bp, Triticum aestivum
atgccagccgcccgcctgtcctccttcaaggctccttcacgagagcgccgacctcccctcgccgccttggctgccgccacggagcgcgtccgcgccggaacgctaagtcggcaggacgcgcaccacctgttcgacgaattgctgagccaagccgcgacagtcccagtacgcaagctgaacaactttcttgccgccctcgcccgtgcaccgccctcagctgcctgcagcgatggtccgggccttgccatcgccctcttcaaccgcatgtcccgaggcgctggtgcacgggtggtgtcgcccacgctctgtacctattccatcctcatggactgctgctgccgtgcacgccgcccggacttggtggttgccttcttcggccgcctcctcaggttggggctgcgcttggaggtcatctccttcaacaatctcctcaaggggctttgccaggccaagcgctcaaatgaggctttggacatgctgctccaccggacacctgaactacactgtgcgcctgatgtcttctcgtacaacatagtaatcaacggctgcttgaaagaaggtgaagtagacaaagcgtgcaatctcttccatgagatgccccaactgggagttcaacctgatgtggtgacctacacctcaatcatggacgcactaagcaagtccggagcaatggacaaggcagaagtgctccttcggcaaatggttgatcaaggaattgaacccaatatcaagacatatagctatctgatccatggatattctacttttggtcagtggaaggaggcacttagggtattcaaagaaatggcaagtcttggtgttgtaccagacgttgtcacgttgacctcattaatcgattccctttgcaagcacagaaggacaaaggaagctagagaaatttttgactctatggctgcaaagggcctgaaacctaatatcgtctcctactctactatgcctaatgggtatgtcaaagaaggatccttcgaggatatgactgatctcttcaattcgatggtacggaatggtatcgtacctaaccaccatattttcaacatactgatcaatgcatatgctaaacgtggagtgatggatgaggctatgcacatgttcgaagtaatgaggcaacaaggagtaaacccggatgtatttgactatcaaatcataatggattcactttgcaaaatgggtaggatggatgctgctctggacaaatttaatcagatggtcaatcaaggagtttcacctaacaaagctgtttaccaatgcctggttctgggttcttgctctcatggtcattttgtgaaagccaaggaattgatttctgaagtggttaatagaggtctgtgttctaacactgtgttcttctatcctgtaataaacggcctttgcaaagaaggaaaggtaaaggaggcacaggatatgtttgacttcatcctaggtattggtcagcggcctgatgtgattatgtacacttcactgatggatggatattgccttgttggcgaggtggagaaagcactgagtgtactcgatgctatgaaatctgctggccttcaacctgatgatgttgtatatgctacacttcttaacggttactgtaaaattggaaggatcgccgatggattgagccttttcagggaaatgtcactcagcggggttaagcccatgactattatatacaacattatactggatgggctgttttgctctgggagaacagtttgtgcaaaggaaaaattcaatacgatgactgaaagtggcataccagtgggcgttgacacatacaacatagttcttagtggactttgtagaaacaattgcactgatgaagcaatagagctgttcaagaaactacgtgcaacgaacgtgaagattgatgtcataacactcactaccatgatttctgcaatgtttaaaactaggagaattgaagaggccaaggatttgtttgctactatatcagccattgggttcatgccttctgttgtgacttacagtgtaatgatgacaaatttcataaaagaagggttgctggcagaggctgatgatatgtttttaacaatggagaaggctagctgtgcttccaactccagtctgctaaatcaagtggtcagggcgttgctggaaaaaggtgcagttgtaaaggctgcaacttatctcgctaaacttgatgctaaacagctgtcagttgaagcttcaacgatttcgttaatagtatctctcttctcaagggaagggaaactaagggagcatgtagagttgcttccagtaaagtaccagcctcctcagagttcggctgacaat

SEQ ID NO: 1829 - DNA, 2307 bp, Triticum aestivum; identical to SEQ ID NO: 1828

SEQ ID NO: 1830 - DNA, 1218 bp, Triticum aestivum
atggatgaggctatgcacatgttcgaagtaatgaggcaacaaggagtaaacccggatgtatttgactatcaaatcataatggattcactttgcaaaatgggtaggatggatgctgctctggacaaatttaatcagatggtcaatcaaggagtttcacctaacaaagctgtttaccaatgcctggttctgggttcttgctctcatggtcattttgtgaaagccaaggaattgatttctgaagtggttaatagaggtctgtgttctaacagtgtgttcttctatcctgtaataaacggcctttgcaaagaaggaaaggtaaaggaggcacaggatatgtttgacttcatcctaggtattggtcagcggcctgatgtgattatgtacacttcactgatggatggatattgccttgttggcgaggtggagaaagcactgagtgtactcgatgctatgaaatctgctggccttcaacctgatgatgttgtatatgctacacttcttaacggttactgtaaaattggaaggatcgccgatggattgagccttttcagggaaatgtcactcagcggggttaagcccatgactattatatacaacattatactggatgggctgttttgctccgggagaacagtttgtgcaaaggaaaaattcaatacgatgactgaaagtggcataccagtgggcgttgacacatacaacatagttcttagtggactttgtagaaacaattgcactgatgaagcaatagagctgttcaagaaactacgtgcaacgaacgtgaagattgatgtcataacactcactaccatgatttctgcaatgtttaaaactaggagaattgaagaggccaaggatttgtttgctactatatcagccattgggttggtgccttctgttgtgacttacagtgtaatgatgacgaatttcataaaagaagggttgctggcagaggctgatgatatgtttttaacaatggagaaggctagctgtgcttccaactccagtctgctaaatcaagtggtcagggcgttgctggaaaaaggtgcagttgtaaaggctgcaacttatctcgctaaacttgatgctaaacagctgtcagttgaagcttcaacgatttcgttaatagtatctctcttctcaagggaagggaaactaagggagcatgtagagttgcttccagtaaagtaccagcctcctcagagttcggctgacaat

SEQ ID NO: 1831 - DNA, 2307 bp, Triticum aestivum; identical to SEQ ID NO: 1828

SEQ ID NO: 1832 - DNA, 825 bp, Triticum aestivum
atggatggatattgccttgttggcgaggtggagaaagcactgagtgtactcgatgctatgaaatctgctggccttcaacctgatgatgttgtatatgctacacttcttaacggttactgtaaaattggaaggatcgccgatggattgagccttttcagggaaatgtcactcagcggggttaagcccacgactattatatacaacattatacttgatgggctgttttgctctgggagaacagtttgtgcaaaggaaaaattcaatacgatgactgaaagtggcataccagtgggcgttgacacatacaacatagttcttagtggactttgtagaaacaattgcactgatgaagcaatagagctgttcaagaaactacgtgcaacgaacgtgaagattgatgtcataacattcaataccatgatttctgcaatgtttaaaactaggagaattgaagaggccaaggatttgtttgctactatatcagccattgggttggtgccttctgttgtgacttacagtgtaatgatgacgaatttcataaaagaagggttgctggcagaggctgatgatatgtttttaacaatggagaaggctagctgtgctcccaactccagtctgctaaatcaagtggtcagggcgttgctggaaaaaggtgcagttgtaaaggctgcaacttatctcgctaaacttgatgctaaacagctgtcagttgaagcttcaatgatttcgttaatagtatctctcttctcaagggaagggaaactaagggagcatgtagagttgcttccagtaaagtaccagcctcctcagagttcggctgacaat

SEQ ID NO: 1833 - DNA, 2355 bp, Triticum aestivum
atgtcgccactccgcctccgcctccgcctccggccccgcctccatgcccgccactcctactccacctcgcatccctcacgcagccagggctgggatccccacgccgccttcgctgctgccacggagcgagctcgatctggcaacctcacctcggaggacgcacacaagctgttcgaccaattgctcctgcaggctaatccggtcaacatgcgccttcccaacgaccttctcaccgccctggctcgcgcgcctgcgtccgcagcctgcagcaacggccccgcccttgccctcgccctcttcagccgtttgtcccaaggtgcccgccaacgggtggtgcagccaacggcctgcacctacggcatcctcatggactgctgctgccgcgcaaaccgccaggatctggcgctcgccttcttcgcccgtctcctcaggacgggactcaaggcaggcgtcatagaagtcaacactcttctcaagggactctgccgcgcaaagcgggctgatgaggctctggacattctgcttcacaggatgcctgagctaggctgcacccccaacgtggtggcatataacacggtcatccatggcttcttccaagaaggccaagcaggcaaggcgtgcagcttgttccatgaaatggcgcagcagggcgttgcgcctagtttggtgacatataactcggttattgatgcgctgtgcaaggccagagccatggacaaggcagagtatttccttcgtcagatggttgatgatggtgtcgtacctgataatgtgacatataatagcctcatccatggatattcctcttcaggccactggaaggaggcagttagggtattcaaagagatgacaagtcggagggttaaaccaattgtgcatactcacaacatgtttatgacctttctttgcaaacatggaagaagcaaagaagctgcaggaatttttgataccatggctatgaagggcctgaaacataacaacgtttcatatgctattctccttcacgggtatgccaccgaaggatgcttagttgatatgattaatctcttcaattcaatggaaagatactgcattctacctgactgtcgtatcttcaacatactgattaatgcacatgctaaatctgggaagcttgataaggccatgcttatcttcaatgaaatgcagaaacaaggagtgagtccaaatgcagtcacatattcaaccataatacatgcattttgcaaaaagggtaggttggacgatgctgtgataaagtttaatcagatgattgatacaggagtacgacagggcacagctgtttatcgttccctaatccagggtttttgtacacacggcgatttggtgaaagcaaaggaattgcttactgaaatgatgaacaaaggtatgcttcctcctgatattgcattcttcaattcaatcatgcagaacctttgcacagaaggaagggtaatagaagcacgggatgtccttggcttgatagcgcacataggtatgaggcctgatgtttgcacatttaatatactgatcggtggatactgcctagtcggcaagatggaacatgcctcaaaaatatttgatgatatgatgtcatatggcttagaaccttctaatattacgtatggtatacttattaatggctattgcaaaaatagaaggattgatgacgggcttattctgttcaaagagatgctgcacaagggacttaaacctacaacttttaattataacgtcatactggatggattatttctggctggacgaactgttgctgcaaaggaaaagtttgatgagatggttgaatctggagtaagtgtgtgcattggtacatattcgatagttcttggtggactttgtagaaataattgtagcggcgaagcaatcacgctattccagaaattaagcacaatggatgtgaaattcaatattataattgtcaatataatgattgatgctttctacaaggttcagcgaaaccaagaagccaaggatttgtttgctgcagtatcagccaatggtttggtagctaatgtctttacctacaccataatgatgaaaaatcttataaaagaagggtcagtggaagaagctgacgatctctttttatcaatggagaagagcagctgtactgctgactcttatatgttaaatcttatcgtcagaatgttactgggaaaaggagagatagtcaaggctgggaattatatatctaaaattgatgcaaagagctactcacttgaagctaaaactgtttcgctgcttatctctctcttttcagggaaagggaaatatagagaacacataggattgctccctgcaaagtatcggtttcgtgaagaagcagctacagttgtg

SEQ ID NO: 1834 - DNA, 1515 bp, Triticum aestivum
atgtcgccgctccgcctccatgcccgccgctcctactccacctcgcatcccccacgcagccagggctgggatccccacgccgccttcgcagctgccacggagcgcgcgcgatctggcaacctcacctcggaggacgcacacaagctgttcgaccaattgctcctgcaggctaatccggtcaacatgcgccttcccaacgaccttctcaccgccctggctcgcgcgcctgcgtccgcagcctgcagcaacggccccgcccttgccctcgccctcttcagccgtttgtcccaaggtgcccgccaacgggtggtgcagccaacggcctgcacctacggcatcctcatggactgctgctgccgcgcaaaccgccaagatctggcgctcgccttcttcgcccgtctcctcaggacgggactcaaggcaggcgtcatagaagtcaacactcttctcaagggactctgccgcgcaaagtgggctgatgaggctctggacattctgcttcacaggatgcctgagctaggctgcacccccaacgtggtggcatataacacggtcatccatggcttcttccaagaaggccaagcaggcaaggcgtgcagcttgttccatgaaatggcgcagcagggcgttgcgcctagtttggtgacatataactcggttattgatgcgctgtgcaaggccagagccatggacaaggcagagtatttccttcgtcagatggttgatgatggtgtcatacctgataatgtgacatataatagcctcatccatggatattcctcttcaggccactggaaggaggcagttagggtattcaaagagatgacaagtcggagggttaaaccaaatgtgcatactcacaacatgtttatgacctttctttgcaaacatggaagaagcaaagaagctgcaggaatttttgataccatggctatgaagggcctgaaacataacaacgtttcatatgctattctccttcacgggtatgccaccgaaggatgcttagttgatatgattaatctcttcaattcaatggaaagatactgcattctacctgactgtcgtatcttcaacatactgattcatgcacatgctaaatctgggaagcttgataaggccatgcttatcttcaatgaaatgcagaaacaaggagtgagtccaaatgcagtcacatattcaaccataatacatgcattttgcaaaaagggtaggttggacgatgctgtgataaagtttaatcagatgattgatacaggagtacgacagggcacagctgtttatcgttccctaatccagggtttttgtacacacggcgatttggtgaaagcaaaggaattgcttactgaaatgatgaacaaaggtatgcttcctcctgatattgcattcttcaattcaatcatgcagaacctttgcacagaaggaagggtaatagaagcacgggatgtccttggcttgatagcgcacataggtatgaggcctgatgtttgcacatttaatatactggtggatactgcc

SEQ ID NO: 1835 - DNA, 2355 bp, Triticum aestivum; identical to SEQ ID NO: 1833

SEQ ID NO: 1836 - DNA, 2007 bp, Triticum aestivum
atgaggtcgtcgccagcaccctcctcaagtgcctcttctgtgcaaaacgggcagatgaagctgttgaacgtgctgcttcataggacgtccgtcctcggctgtgtgcctaattccttctcatacaacatagttctaaagagtttatgtgacgacagcaggagccagcaagcactcggcctgctccaggtgatggcaaagggagatgattgctcccccggcgttctgtcatatagcacgctcatccacggcttctttaaggaaggcgaagtaggcaaggcatgcaatctattccatgaaatgatgcggcaaggggttgtgcctgatgtggtgacgtatagctcgattattgatgcactgtgcaaggctggagcaatggacaaggcagagttgttccttcggcagatggttgataacagtgttcgaccggatacggtgacatatactagcatgatccatggatattccactttgggccggtggaaagaggcgactaaaatgttcagagaaatgacaagcaggggccttataccaaatattgtcacttggaactcattcatggcctccctttgcaagcatggaaaaagcaaagaagctgcagaaattttcttttccatggctgcaaggggccacaagcctgatatcatctcctacactattcttcttcatgggtatgccaatgaaggaagctttgctgatatgatgaatctctttaattcaatggtaggcgacggtattgtagccaactgccaagttttcaacatattaattgatgcatatgctaaacaaagaatgatggatgaagctatgatcatacttaataaaatgcggggacaaggactgagtccggatgtattcacctattcaactctagtatctgcactttgcaaaatggttagactggctgatgctatgggtaagttcagtcagatgattggtaggggagtacaaccgaacacagttgtttaccactccgtagttcagggcttatgcacacatggtgttttggtaaaagcaaaggagttggttaatgaaatgatgaataaaggtatgcttcgtccaaacattgcattcttcaattcaataatggacaacctatgcaatgaaggaagggttgtggatgcacaccatatctttgacttgattacagacataggtgagaaacctgatgtcattacatttagtacgctaattgacggatattgcttagtcggtgagatggagaaagcatgcggagtacttgatgccatggtatcagctggcattgagcccgatgtcattacgtataacacacttgtcagtggatactgtaaaagtggaaggattgatgatgggttgaatctgttcagagaaatgttccatatggaagttaaacctacaactgttacatataacatcatactggatggattatttcatgctgggagaacagttgctgcaaagaaaatgctccatgagatgatcggaagtggaacacctgtgagcatgcatacatacgacatatttattagaggactttgtagaaatgattgcaccgatgaagcaatcgcccttttccaaaaattaggtgcactgaatgtgaagttcgatattgcaatactcaattccatgattaatgcaatgtacaaggttcagagaagagaagaagctaacaagttgtttgctgctatatcaaccagtgggttggtacctaatgcttccacgtatggaatcatgataagaaatcttctaaaagagggatcagtggaagaagctgaagatatgttttcatcaatggagaagagtgattgtgctctcagctctcgtcttataaatgatatcattagaatgttattggaaaagggggagatagtcaaggccggagaatacatgtctaaagttgatgggaagagcatctcgcttgaagcttcaactagttcgttgttgttgtctctcttttcagggaaagggaaatatcgggaacaaatacaattgctccctgcaaagtaccaatttttcgatggaaccatt

SEQ ID NO: 1837 - DNA, 2007 bp, Triticum aestivum; identical to SEQ ID NO: 1836

SEQ ID NO: 1838 - DNA, 2436 bp, Triticum aestivum
atgtcctgcctccacctcctccgccgtcgcacctcctccttcactcccacctcgccgccctcacgctcctggtctccgcacgccgcctttgccgctgccacagagcgcgtccgcgccgggacgctcaccccacaagacgcacaccacctgttcgaccaattgctgcggcagtccactccggtccccgggcaagccctgaacggcttcctcgccggtcttgcccgtgcgcgagacaccgacgcctgcagagacggcccctcccttgccctcacgctcttcaaccgcgtatgccgagaagaagccggccggcgggtggcgccgcccacaatctacacctacggcatcctgatgaactgctgctgccacgtgcgtcgtccagacctagggcttgcctatttcggccgcctcctaaggaccggcctcaatacaaatgaggtcgtcgccagcaccctcctcaagtgcctctgctgtgcaaaacgggcagatgaagctgtgaacgtgctgcttcataggacgtccgtcctcggctgtgtgcctaattccttctcatacaacatagttctaaagagtttatgtgacgacagcaggagccagcaagcactcggcctgctccaggtgatggcaaagggagatgattgctcccccggcgttctgtcatatagaacgctcatccacggcttctttaaggaaggcgaagtaggcaaggcatgcaatctattccatgaaatgatgcggcaaggggttgtgcctgatgtggtgacgtatagctcgattattgatgcactgtgcaaggctggagcaatggacaaggcagagttgttccttcggcagatggttgataacagtgttcgaccggatacggtgacatatactagcatgatccatggatattccactttgggccggtggaaagaggcgactaaaatgttcagagaaatgacaagcaggggccttataccaaatattgtcacttggaactcattcatggcctccctttgcaagcatggaaaaagcaaagaagctgcagaaattttcttttccatggctgcaaggggccacaagcctgatatcatctcctacactattcttcttcatgggtatgccaatgaaggaagctttgctgatatgatgaatctctttaattcaatggtaggcgacggtattgtagccaactgccaagttttcaacatattaattgatgcatatgctaaacaaggaatgatggatgaagctatgatcatacttaataaaatgcggggacaaggactgagtccggatgtattcacctattcaactctagtatctgcactttgcaaaatgggtagactggctgatgctatgggtaagttcagtcagatgattggtaggggagtacaaccgaacacagttgtttaccactccctagttcagggcttatgtacacatggtgttttggtaaaagcaaaggagttggttaatgaaatgatgaataaaggtatgcttcgtccaaacattgcattcttcaattcaataatggacaacctatgcaatgaaggaagggttgtggatgcacaccatatctttgacttggttacagacataggtgagaaacctgatgtcattacatttactacgctaattgacggatattgcttagtcggtgagatggagaaagcatgcggagtacttgatgccatggtatcagctggcattgagcccgatgtcattacgtataacacacttgtcagtggatactgtaaaagtggaaggattgatgatgggttgaatctgttcagagaaatgtcccatatggaagttaaacctacaactgttacatataacatcatactggatggattatttcatgctgggagaacagttgctgcaaagaaaatgctccatgagatgatcggaagtggaacacctgtgagcatgcatacatacgacatatttattagaggactttgtagaaatgattgcaccaatgaagcaatcgcccttttccaaaaattaggtgcactgaatgtgaagttcgatattgcaatactcaattccatgattaatgcaatgtacaaggttcagagaagagaagaagctaacaagttgtttgctgctatatcaaccactgggttggtacctaatgcttccacgtatggaatcatgataagaaatcttctaaaagagggatcagtggaagaagctgaagatatgttttcatcaatggagaagagtgattgtgctctcagctctcgtcttataaatgatatcattagaatgttattggaaaagggggagatagtcaaggccggagaatacatgtctaaagttgatgggaagagcatctcgcttgaagcttcaactagttcgttgttgttgtctctcttttcagggaaagggaaatatcgggaacaaatacaattgctccctgcaaagtaccaatttttcgatggaaccatt

SEQ ID NO: 1839 - DNA, 2007 bp, Triticum aestivum; identical to SEQ ID NO: 1836

SEQ ID NO: 1840 - DNA, 2436 bp, Triticum aestivum; identical to SEQ ID NO: 1838

SEQ ID NO: 1841 - DNA, 2436 bp, Triticum aestivum; identical to SEQ ID NO: 1838

SEQ ID NO: 1842 - DNA, 2364 bp, Triticum aestivum
atgcctcgcttctccaccaccacgccaatgtcgccaccacgcctccgcctccgactcggcgcccgccactcctcctccacctctcatccctcatgcatctgggatccccacgccgccttcgccgccgcgacgcagcgggcgcgctctggcaagctcaccacggaggacgcacaccacctgttcgacgaattgctgcggcagggcaatcctgtccaggagcgtcccttgactaactttctggctgccctcgcccgtgcgcccgcgtccgcatcctgcagcgacggccccgccctggccgtcgccctttttggccgtttgtcccgaggcgctggacgaggggtggcacagccaaatgtcttcacctatggcgtcctaatggactgctgctgccgtgcgcgcttcccagatttggcgctcgccttctttggccgtctcctcaggacgggcctgaaggcagaccaagtcgttttcagcaccctcctcaagggactctgccacgcaaagcgctcagatgaggctctggacgtgctgctgcacaggatgcctgagctgggctgcacccccgacgtggtggtgtataataccgtcatccatggcttctttagggaaggccaagcaggcaaggcgtgcgatctgttccatggaatggcgcagcagggcgttatgcctgatgtggtgacatataactcggttatcgatgcactgtgcaaggccagagcaatggacaaggcagagtatttccttcgtcagatggttgatgatggtgttgtacctgataatgtgacatatagtagcctcatccatggatattcctcttcaggccactggaaggaggctgttagggtattcaaagagatgacaagtcggagggttacaccagatgtgcatacttacaacatgtttatgacctttctttgcaaacatggaagaagcaaagaagctgcaggtatttttgataccatggctatgaagggcctgaaacctgacaacatttcatatgctattcgccttcatgggtatgccaccgaaggatgcttagttgatatgattaatctcttcaattcaatggaaagagactgcattctacctgactgtcgtatcttcagcatactgattaatgcatatgctaaatctggaaagcttgataaggctatgcttatcttcaataaaatgcagaaacaaggagtgagtccaaatgcagtcacatattcaactgtaatagatgcattttgcaaaaagggtcagttggacgatgctatgataaagtttaatcagatgattgatacaggagtacgacagggcacagctgtttatggttctctaatccagggtttttgtacacacggcgatttggtgaaagcaaaggaattgcttactgaaatgatgaacaaaggtatacctcctcctgatattaagttcttccattcaatcatgcagaacctttgcacagaaggaagggtaatagaagcacgggatgtctttggcttgatggcgcacataggtatcaggcctaatgtttgcacatttaatatactgatcggtggatactgcctagtcggcaagatggaggatgcctcaaaaatatttgatgatatgatgtcatatggtttagaaccttctaatattacgtatggtatacttattaatggctattgcaaaaacgaaaggattgatgatgggctgattctgttcaaagaaatgttgcgcaagggagttaaaccttcaacttttaattataacatcatactggatggattatttctggctggacgaactgttgctgcaaaggaaaagtttgatgagatggttgaatctggagtaagtgtgtgcattgatacatattcgatagttcttggtggactttgtagaaataattgtagcggcgaagcaatcatgctattccagaaattaagcacaatggatgtgaaattcaatattataattgtcaatataatgattgatgccttctacagggttcagcgaaaccaagaagccaaggatttgtttgctgcagtatcagcgaatggtttggtagctaatgtctttacctacaccataatgatgaaaaatcttataaaagaagggtcagtggaagaagctgacgatctctttttatcaatggagaagagcggctgtactgctgactcttatatgttaaatcttatcgtcagaatgttacttgaaaaaggagagctagtcaaggctgggaattatatgtctaaagttgatgcaaagagctactcacttgaagctgaaaccgtttcgctgcttatctctctcttttcagggaaagggaaatatagagaacacataggattgctccctacaaagtatcagtttcgtgaagaagcggccacagttgaa

SEQ ID NO: 1843 - DNA, 1863 bp, Triticum aestivum
atgattaaaagggatgtagataagataactgaaggttgccgcctagcacattcacattggtacaacttggaaaagcacagccccgtcgtcctgctcccagttgagttcgcgacctacacaccggccatgccccgcttctcctccaccacgccaatgtcgccaccccgcctccgcctccgactccgactctgcgcccgccactcctcctccacctctcatccctcacgcatctgggatccccacgccgccttcgccgccgccacggagcgtgcgcgttcaggcaacctcaccccggaggacgcacaccacctgttcgacgaattgctgcggcagggcaatcctgtccaggagcgtcccttgactaactttctggctgccctcgcccgtgcgcccgcgtccgcatcctgcagcgacggccccgccctggccgtcgccctttttggccgtttgtcccgaggcgctggacgaggggtggcacagccaaatgtcttcacctatggcgtcctaatggactgctgctgccgtgcgcgcttcccagatttggcgctcgccttctttggccgtctcctcaggacgggcctgaaggcagaccaagtcgttttcagcaccctcctcaagggactctgccacgcaaagcgctcagatgaggctctggacgtgctgctgcacaggatgcctgagctgggctgcactccctatgtggtggcgtataacaccgtcatccatggcttctttagggaaggccaagcaggcaaggcgtgcgatctgttccatggaatggcgcagcagggcgttatgcctgatgtggtgacatataactcggttatcgatgcgctgtgcaaggccagagcaatggacaaggcagagtatttccttcgtcagatggttgatgatggtgttgtacctgataatgtgacatatagtagcctcatccatggatattcctcttcaggccactggaaggaggctgttagggtattcaaagagatgacaagtcggagggttacaccagatgtgcatacttacaacatgtttatgacctttctttgcaaacatggaagaagcaaagaagctgcaggtatttttgataccatggctatgaagggcctgaaacctgacaacatttcatatgctattcgccttcatgggtatgccaccgaaggatgcttagttgatatgattaatctcttcaattcaatggaaagggactgcattctacctgactgtcgtatcttcagcatactgattaatgcatatgctaaatctgggaagcttgataaggctatgcttatcttcaataaaatgcagaaacaaggagtgagtccaaatgcagtcacatattcaactgtaatagatgcattttgcaaaaagggtcagttggacgatgctatgataaagtttaatcagatgattgatacaggagtacgacagggcacagctgtttatggttctctaatccagggtttttgtacacacggcgatttggtgaaagcaaaggaattgcttactgaaatgatgaacaaaggtatacctcctcctgatattaagttcttccattcaatcatgcagaacctttgcacagaaggaagggtaatagaagcacgggatgtccttggcttgatggcgcacataggtatcaggcctaatgtttgcacatttaatatactgatcggtggatactgcctagtcggcaagatggaggatgcctcaaaaatatttgatgatatgatgtcatatggtttagaaccttctaatattacgtatggtatacttattaatggctattgcaaaaacgaaaggattgatgatgggctgattctgttcaaagaaatgttgcgcaagggagttaaaccttccaagttt

SEQ ID NO: 1844 - DNA, 2376 bp, Triticum aestivum
atgccccgcttctcctcctccacgccaatgtcgccaccccgcctccgcctccgactccgactccgactctgcgcccgccactcctcctccacctctcatccctcacgcatctgggatccccacgccgccttcgccgccgcgacgcagcgggcgcgctctggcaagctcaccacggaggacgcacaccacctgttcgacgaattgctgcggcagggcaatcctgtccaggagcgtcccttgactaactttctggctgccctcgcccgtgcgcccgcgtccgcatcctgcagcgacggccccgccctggccgtcgccctttttggccgtttgtcccgaggcgctggacgaggggtggcacagccaaatgtcttcacctatggcgtcctaatggactgctgctgccgtgcgcgcttcccagatttggcgctcgccttcttgggccgtctcctcaggacgggcctgaaggcagaccaagtcgttttcagcaccctcctcaagggactctgccacgcaaagcgctcagatgaggctctggacgtgctgcttcacaggatgcctgagcagggctgcactccctatgtggtggcgtataacaccgtcatccatggcttctttagggaaggccaagcaggcaaggcgtgcgatctgttccatggaatggcgcagcagggcgttatgcctgatgtggtgacatataactcggttatcgatgcgctgtgcaaggccagagcaatggacaaggcagagtatttccttcgtcagatggttgatgatggtgttgtacctgataatgtgacatatagtagcctcatccatggatattcctcttcaggccactggaaggaggctgttagggtattcaaagagatgacaagtcggagggttacaccagatgtgcatacttacaacatgtttatgacctttctttgcaaacatggaagaagcaaagaagctgcaggtatttttgataccatggctatgaagggcctgaaacctgacaacatttcatatgctattcgccttcatgggtatgccaccgaaggatgcttagttgatatgattaatctcttcaattcaatggaaagggactgcattctacctgactgtcgtatcttcagcatactgattaatgcatatgctaaatctgggaagcttgataaggctatgcttatcttcaataaaatgcagaaacaaggagtgagtccaaatgcagtcacatattcaactgtaatagatgcattttgcaaaaagggtcagttggacgatgctatgataaagtttaatcagatgattgatacaggagtacgacagggcacagctgtttatggttctctaatccagggtttttgtacacacggcgatttggtgaaagcaaaggaattgcttactgaaatgatgaacaaaggtatacctcctcctgatattaagttcttccattcaatcatgcagaacctttgcacagaaggaagggtaatagaagcacgggatgtccttggcttgatggcgcacataggtatcaggcctaatgtttgcacatttaatatactgatcggtggatactgcctagtcggcaagatggaggatgcctcaaaaatatttgatgatatgatgtcatatggtttagaaccttctaatattacgtatggtatacttattaatggctattgcaaaaacgaaaggattgatgatgggctgattctgttcaaagaaatgttgcgcaagggagttaaaccttcaacttttaattataacatcatactggatggattatttctggctggacgaactgttgctgcaaaggaaaagtttgatgagatggttgaatctggagtaagtgtgtgcattgatacatattcgatagttcttggtggactttgtagaaataattgtagcggcgaagcaatcatgctattccagaaattaagcacaatggatgtgaaattcaatattataattgtcaatataatgattgatgccttctacagggttcagcgaaaccaagaagccaaggatttgtttgctgcagtatcagcgaatggtttggtagctaatgtctttacctacaccataatgatgaaaaatcttataaaagaagggtcagtggaagaagctgacgatctctttttatcaatggagaagagcggctgtactgctgactcttatatgttaaatcttatcgtcagaatgttacttgaaaaaggagagctagtcaaggctgggaattatatgtctaaagttgatgcaaagagctactcacttgaagctgaaaccgtttcgctgcttatctctctcttttcagggaaagggaaatatagagaacacataggattgctccctacaaagtatcagtttcgtgaagaagcggccacagttgaa

SEQ ID NO: 1845 - DNA, 2352 bp, Triticum aestivum
atgcctcgcctctcctccaccacgcccatgtcgccactccgcctccgcgcccgccactcctcctccacctctcatccctcacgcatctgggatccccacaccgccttcgccaccgccacggagcgtgcgcgttcaggcaacctcaccccggaggacgcacaccacctgttcgacgaattgctgcggcaggccaatcctgtccaggagcgccccctcaacaaccttcttgccgccctcgcccgcgctccggcgtccgcggcgtgcagcgatggccctgcactcgcagtcaacctcttcagccgcatatccgaaggcgcccgccgacgtgtggcgcacccaacggcctgcacctacggcatcctcatggactgctgctgccgcgcaaaccgccaggatctggcgctcgccttcttcgcccgtctcctcaggacgggactcaaggcaggcgtcatagaagtcaacactcttctcaagggactctgccgcgcaaagcgggctgatgaggctctggacattctgcttcacaggatgcctgagctaggctgcacccccaacgtggtggcatataacacggtcatccatggcttctttagggaaggccaagtaggcaaggcgtgcaatctattccatgaaatgaggcagcagggcgttacacctgatgttgtgacatataactcggttattgatgcgttgtgcaaggccaaagcaatggacaaggcagagtatttccttggtcagatggttgatgatggtgtcgtatctgataatgtgacatataatagcctcatccatggatattcctcttcaggccactggaaggaggctgttagggtattcaaagagatgacaagtcggagggttacaccagatttgcatacttacaacatgtttatgacctttctttgcaaccatggaagaagcaaagaagctgcaggaatttttgattccatggctatgaagggcctgaaacctgacaacgtttcatatgctattcgccttcatgggtatgccaccgaaggatgcttagttgatatgattaatctcttcaattcaatggaaagagactgcattcttcctgactgtcgtatcttcagcatactgatttatgcatatgctaaatctgggaagcttgataaggctatgcttatcttcaatgaaatgcagaaacaaggagtgagtccaaatgcagtcacatattcaaccgtaatagatgcattttgcaaaaagggtcagttggacgatgctatgataaagtttaatcagatgattgatacaggagtacgacagggcacagctgtttatcgttccctaatccagggattttgtacacacggcgatttggtgaaagcaaaggaattgcttactgaaatgatgaacaaaggtatacctcctcctgatattaagttcttccattcaatcatgcagaacctatgcacagaaggaagggtaatagaagcacgggatatccttggcttgatagcacacataggtatgaggcctaatgtttgcacatttaatatactgattggtggatactgcctagtccgcaagatggcagatgcatcgaaagtatttgatgatatggtgtcatatggtttagaaccttgtaactttacgtatggtatacttattaatggctattgcaaaaatagaaggattgatgacgggcttattctgttcaaagagatgctgcacaagggacttaaacctacaactgttaattataacgtcatactggatggattatttctggctggacaaactgttgctgcaaaagagaagtttgatgagatggttgaatctggagtaagtgtgtgcattgatacatactctatagttcttggtggactttgtagaaatagctgcagtagcgaagcgatcaccctgttccgaaaattaagtgcaatgaatgtgaaatttgatattaaaattgtcaatatcattattggtgcattctacagggtcaagagaaaccaagaggctaaggatttgtttgctgctataccagccaatggcttggttcctaatgctgttacctacaccataatgatgacaaatcttataaaagaaggttcagtggaagaagccgacaatctttttttatcaatggagaagagcggctctactgcaaactcttggatgttaaatcatattatcagaaggttactggaaagaggagagatagtcaaggctggaaattatatgtctaaagttgatgtaaagagctactcacttgaagctaaaactgtttcactgctgatctctctgttttcaagggaaggggaatatagagaccacatcaaattgctccctataaagtatcagtttctggaaaaaccagccacagttgaa

SEQ ID NO: 1846 - DNA, 2352 bp, Triticum aestivum; identical to SEQ ID NO: 1845

SEQ ID NO: 1847 - DNA, 2364 bp, Triticum aestivum
atgcctcgtttctcctccaccacgtcaatgtcgtcactccgcctccgcctccacgcccgccactcctcctccgcctctcaaccctcacacagccagggctgggatccccacgccgccttcgccgccgccacggagcgtgcgcgctctggcagcctcaccccggtggacgcacaccacctgttcgacgaattgctccggcagaccaatcctgtccaggagcaacccctcaacaaccttctcgccgccctcgcccgcgctccggcgtccaacgcctgcagagacggccctgcactcgcggtcgccctcttcagccgcatatcccaaggcgcccgcctacgggtggcgcagccaacggcctgcacctacggcatcctcatggactgctgctgtcgtgcacatcgcctggatctggcgtttgccttcttcggccgtctcctcaggacgggactgaaggcaggcgtcattcaactctgcactcttctcaagggcctttgccgcgcaaagcgggctgatgaggccatggacgtgctgcttcataggatgcctgagctgggctgcacccccaacgtggtggcctataccacggtcatccacggcttcttgaaggaaggccaagtaggcaaggcatgcaatctattccatggaatggcgcagcagggcgttgcacctaatgtggtgacatataactcggttatcgatgcgctatgcaaggccagggccatgggaaaggcagagatggtccttggtcaaatggttgttaatggtgttggaccgagtaacgtgacatataatactctcatccatggatattcctcttcaggtcatcagaaggaggcagttagggtgctgaaagaaatgagaagtcagggtatcataccagatgtttttacttgcagctcgctcatggcctccctttgcaacaacggaaaaagcaaagaagctgaagaaattcttcactccatggtcatgaagggcctgaaacctgacatcgtctcgtacagtactctgcttcacgggtatgccaccgaaggatgcttagttggtatgactaatctcttcaattcaatgactagatatggcattcgccctaacagtcatgcttttaacatactgattaatgtatgtgctaaatctggcatgatggatgaggctatgcttatatttaaagaaatgcagaagcgaggagtgagtccaaatctagtcacctattcaactgtaatacatgcattttgcaaaatgggtagcttggacattgctatggacaaatttaaccagatggttgatataggagtacgaccggatgcaattgtttatcgttccctaatccatggtttttgtacacatggggatttagtgaaaccaaaggaattggttactgaaatgaggaacaaaggtatgcgtcctcctgatattaagttcttccattcaataatgcagaacctatgcacggaaggaagggtaatagaagcacgggatatcctcgacttgatagtgcgcattggtatgaggcctgatgttttcatatttaatatactgatcggtggatactgcctagtccgcaagatggcagatgcatcaaaaatatttgatgatatggtgtcatatggtttagaaccttcaaatattacgtatggtatacttattaatggctattgcaaaaacagaaggattgatgaggggctgattctattcaaagaaatgttgtgcaagggacttaaacctacaacttttaactataacgtcatactggatggactatttctggctggacgaactgttgctgcgaaggagaagtttgatgagatggttgaatctggagtaagtgtgtgcatcgatacttactctatatttcttgctggactttgcagaaataattgctttagtgaagtaatcatgctgttccagaaattaagcgcaatgaacatgaaattcaatattagaattgtcaatatcatgattgatgccttctacaaggttcggcgaaaccatgaagctaaggatttgtttgccgcaataccatccaatggcttggtagctaatgttgttacctacagcataatgatgacaaatctgataaaagaaggttcagtggaagaagctgacactctctttttatcaatggagaagagcggctgtactgcaaactcttggatgttaaatcatattatcagaaggttactggaaagaggagagatagtcaaggctggaaattatatgtcgaaagttgatgcaaagagctactcacttgaagctaaaactgttttgctgctgatctctctcttttcagggaaagggaaatatagagaacacataaaattgctccctatgaagtatcagtttctcgaagaaccagacacagttgaa

SEQ ID NO: 1848 - DNA, 2364 bp, Triticum aestivum
atgcctcgtttctcctccaccacgtcaatgtcgtcactccgcctccgcctccacgcccgccactcctcctccgcctctcaaccctcacacagccagggctgggatccccacgccgccttcgccgccgccacggagcgtgcgcgctctggcagcctcaccccggtggacgcacaccacctgttcgacgaattgctccggcagaccaatcctgtccaggagcaacccctcaacaaccttctcgccgccctcgcccgcgctccggcgtccaacgcctgcagagacggccctgcactcgcggtcgccctcttcagccgcatatcccaaggcgcccgcctacgggtggcgcagccaacggcctgcacctacggcatcctcatggactgctgctgtcgtgcacatcgcctggatctggcgtttgccttcttcggccgtctcctcaggacgggactgaaggcaggcgtcattcaactctgcactcttctcaagggcctttgccgcgcaaagcgggctgatgaggccatggacgtgctgcttcataggatgcctgagctgggctgcacccccaacgtggtggcctataccacggtcatccacggcttcttgaaggaaggccaagtaggcaaggcatgcaatctattccatggaatggcgcagcagggcgttgcacctaatgtggtgacatataactcggttatcgatgcgctatgcaaggccagggccatgggaaaggcagagatggtccttggtcaaatggttgttaatggtgttggaccgagtaacgtgacatataatactctcatccatggatattcctcttcaggtcatcagaaggaggcagttagggtgctgaaagaaatgagaagtcagggtatcataccagatgtttttacttgcagctcgctcatggcctccctttgcaacaacggaaaaagcaaagaagctgaagaaattcttcactccatggtcatgaagggcctgaaacctgacatcgtctcgtacagtactctgcttcacgggtatgccaccgaaggatgcttagttggtatgactaatctcttcaattcaatgactagatatggcattcgccctaacagtcatgcttttaacatactgattaatgtatgtgctaaatctggcatgatggatgaggctatgcttatatttaaagaaatgcagaagcgaggagtgagtccaaatctagtcacctattcaactgtaatacatgcattttgcaaaatgggtagcttggacattgctatggacaaatttaaccagatggttgatataggagtacgaccggatgcaattgtttatcgttccctaatccatggtttttgtacacatggggatttagtgaaaccaaaggaattggttactgaaatgaggaacaaaggtatgcgtcctcctgatattaagttcttccattcaataatgcagaacctatgcacggaaggaagggtaatagaagcacgggatatcctcgacttgatagtgcgcattggtatgaggcctgatgttttcatatttaatatactgatcggtggatactgcctagtccgcaagatggcagatgcatcaaaaatatttgatgatttggtgtcatatggtttagaaccttcaaatattacgtatggtatacttattaatggctattgcaaaaacagaaggattgatgaggggctgattctattcaaagaaatgttgtgcaagggacttaaacctacaacttttaactataacgtcatactggatggactatttctggctggacgaactgttgctgcgaaggagaagtttgatgagatggttgaatctggagtaagtgtgtgcattgatacttactctatatttcttgctggactttgcagaaataattgctttagtgaagtaatcatgctgttccagaaattaagcgcaatgaacatgaaattcaatattagaattgtcaatatcatgattgatgccttctacaaggttcggcgaaaccatgaagctaaggatttgtttgccgcaataccatccaatggcttggtagctaatgttgttacctacagcataatgatgacaaatctgataaaagaaggttcagtggaagaagctgacactctctttttatcaatggagaagagcggctgtactgcaaactcttggatgttaaatcatattatcagaaggttactggaaagaggagagatagtcaaggctggaaattatatgtcgaaagttgatgcaaagagctactcacttgaagctaaaactgttttgctgctgatctctctcttttcagggaaagggaaatatagagaacacataaaattactccctatgaagtatcagtttctcgaagaaccagacacagttgaa

SEQ ID NO: 1849 - DNA, 2370 bp, Triticum aestivum
atgcctcgcttctcttccaccacgccaatggcgtcactccgcctccgcctccgcctccacgcccgcaactactcatccgcctctcaaccctcacacggccagggctgggatccccacgccgccttcgccgccgccacggagcgtgcccgctctggcagcctcaccccggcggacgcacaccacctgttcgacgaattgctgcggcaggccaatcctgtccaggagcgccccctcaacaaccttctcgccgccatcgcccgcgctccggcgtccaacgcctgcagaaacggccctgcactcgcggtcgccctcttcagccgcatatcccaaggcgcccgcctatgggtggtgcagccaacggcttgcacctacggcatcctcatggactgctgctgccgtgcacatcgcctggatctggcgtttgccttcttcggccgtctcctcaggacgggactgaaggcaggcgtcattcaactctgcactcttctcaagggcctttgccgcgcagagcgggctgatgaggccatggacgtgctgcttcataggatgcctgagctgggctgcacccccaacgtggtggcctataccacggtcatccacggcttcttgaaggaaggccaagtaggcaaggcatgcaatctattccatggaatggcgcagcagggcgttgcacctaatgtggtgacatataactcgtttatcgatgcgctatgcaaggccagggccatgggaaaggcagagatggtccttggtcaaatggttgttaatggtgttggacctagtaacgtgacatataatactctcatccatggatattcctcttcaggtcatcagaaggaggcagttagggtgctgaaagaaatgagaagtcagggtatcataccagatgtttttacttgcagctcgctcatggcctccctttgcaacaacggaaaaagcaaagaagctgaagaaattcttcactccatggtcatgaagggcctgaaacctgacatcgtctcgtacagtactctgcttcacgggtatgccaccgaaggatgcttagttggtatgactaatctcttcaattcaatgactagatatggcattcgccctaacagtcatgcttttaacatactgattaatgtatgtgctaaatctggcatgatggatgaggctatgcttatatttaaagaaatgcagaagcgaggagtgagtccaaatctagtcacctattcaactgtaatacatgcattttgcaaaatgggtagcttggacattgctatggacaaatttaaccagatggttgatataggagtacgaccggatgcaattgtttatcgttccctaatccatggtttttgtacacatggggatttagtgaaaccaaaggaattggttactgaaatgaggaacaaaggtatgcgtcctcctgatattaagttcttccattcaataatgcagaacctatgcacggaaggaagggtaatagaagcacgggatatcctcgacttgatagtgcgcattggtatgaggcctgatgttttcatatttaatatactgatcggtggatactgcctagtccgcaagatggcagatgcatcaaaaatatttgatgatatggtgtcatatggtttagaaccttcaaatattacgtatggtatacttattaatggctattgcaaaaacagaaggattgatgaggggctgattctattcaaagaaatgttgtgcaagggacttaaacctacaacttttaactataacgtcatactggatggactatttctggctggacgaactgttgctgcgaaggagaagtttgatgagatggttgaatctggagtaagtgtgtgcatcgatacttactctatatttcttgctggactttgcagaaataattgctttagtgaagtaatcatgctgttccagaaattaagcgcaatgaacatgaaattcaatattagaattgtcaatatcatgattgatgccttctacaaggttcggcgaaaccatgaagctaaggatttgtttgccgcaataccatccaatggcttggtagctaatgttgttacctacagcataatgatgacaaatctgataaaagaaggttcagtggaagaagctgacactctctttttatcaatggagaagagcggctgtactgcaaactcttggatgttaaatcatattatcagaaggttactggaaagaggagagatagtcaaggctggaaattatatgtcgaaagttgatgcaaagagctactcacttgaagctaaaactgttttgctgctgatctctctcttttcagggaaagggaaatatagagaacacataaaattgctccctatgaagtatcagtttctcgaagaaccagacacagttgaa

SEQ ID NO: 1850 - DNA, 2445 bp, Triticum aestivum
atgagtactagtagtagtacatgctcattggtacaacttggaaaagcactccactcgtcttgctcccggttccaccacgccatgcctcgcctctcctccaccacgccaatgtcgccaccccacctccgcctccgactcggcgcccgccactcctcctccacctctcatctctcacgcatctgggatccccacgccgccttcgccgcagccacggagcgtgtgcgctctggcagcctcaccccggcggacgcccaccacctgttcgacgaattgctccggcagaccaatcctgtccaggagcaacccctcaacaaccttctcgccgccctcgcccgcgctccggcgtccaacgcctgcagagacggccctgcactcgcggtcgccctcttcagccgcatatcccaaggcgcccgcctatgggtggtgcagccaacggcttgcacctacggcatcctcatggactgctgctgccgtgcacatcgcctggatctggcgtttgccttcttcggccgtctcctcaggacgggactgaaggcaggcgtcattcaactctgcactcttctcaagggcctttgccgcgcagagcgggctgatgaggccatggacgtgctgcttcataggatgcctgagctgggctgcacccccaacgtggtggcctataccacggtcatccacggcttcttgaaggaaggccaagtaggcaaggcatgcaatctattccatggaatggcgcagcagggcgttgcacctaatgtggtgacatataactcggttatcgatgcgctatgcaaggccagggccatgggaaaggcagagatggtccttggtcaaatggttgttaatggtgttggaccgagtaacgtgacatataatactctcatccatggatattcctcttcaggtcatcagaaggaggcagttagggtgctgaaagaaatgagaagtcagggtatcataccagatgtttttacttgcagctcgctcatggcctccctttgcaacaacggaaaaagcaaagaagctgaagaaattcttcactccatggtcatgaagggcctgaaacctgacatcgtctcgtacagtactctgcttcacgggtatgccaccgaaggatgcttagttggtatgactaatctcttcaattcaatgactagatatggcattcgccctaacagtcatgcttttaacatactgattaatgtatgtgctaaatctggcatgatggatgaggctatgcttatatttaaagaaatgcagaagcgaggagtgagtccaaatctagtcacctattcaactgtaatacatgcattttgcaaaatgggtagcttggacattgctatggacaaatttaaccagatggttgatataggagtacgaccggatgcaattgtttatcgttccctaatccatggtttttgtacacatggggatttagtgaaaccaaaggaattggttactgaaatgaggaacaaaggtatgcgtcctcctgatattaagttcttccattcaataatgcagaacctatgcacggaaggaagggtaatagaagcacgggatatcctcgacttgatagtgcgcattggtatgaggcctgatgttttcatatttaatatactgatcggtggatactgcctagtccgcaagatggcagatgcatcaaaaatatttgatgatatggtgtcatatggtttagaaccttcaaatattacgtatggtatacttattaatggctattgcaaaaacagaaggattgatgaggggctgattctattcaaagaaatgttgtgcaagggacttaaacctacaacttttaactataacgtcatactggatggactatttctggctggacgaactgttgctgcgaaggataagtttgatgagatggttgaatctggagtaagtgtgtgcatcgatacttactctatatttcttgctggactttgcagaaataattgctttagtgaagtaatcatgctgttccagaaattaagcgcaatgaacatgaaattcaatattagaattgtcaatatcatgattgatgccttctacaaggttcggcgaaaccaagaagctaaggatttgtttgccgcaataccatccaatggcttggtagctaatgttgttacctacagcataatgatgacaaatctgataaaagaaggttcagtggaagaagctgacactctctttttatcaatggagaagagtggctgtactgcaaactcttggatgttaaatcatattatcagaaggttactggaaagaggagagatagtcaaggctggaaattatatgtcgaaagttgatgcaaagagctactcacttgaagctaaaactgttttgctgctgatctctctcttttcagggaaagggaaatatagagaacacataaaattgctccctatgaagtatcagtttctcgaagaaccagacacagttgaa

SEQ ID NO: 1851 - DNA, 2376 bp, Triticum aestivum
atgcctcgcttctcctccaccacgcccatgtcgccactccgcctccgcctccgcctccgcctccgactcggcgcccgccactcctcctccacctcccattcctcacgcagctgggatccccactccgccttcgccgccgccgcggagcgtgcgcgctctggcaaccttaccccggaggacgcacaccacctgttcgacgaattgctccggcagggcaatcctatccaggaccgccccttgaacaaacttctctccgccctcgcccgtgctccggcgtccgcgacctgcagaaacggccctgcactcgcggtcgccctcttcagccgcatatcccaaggtgcccgccgacgtgtggcagagccaacggcctgcacctacggcatcctcatggactgctgctgccgcgcacaccgcctcgatctggtgttcgctttcttcggccgtctcctcaggacgggacttaaggcaggcgtcattcaagtttgcactcttctcaagggcctctgccgcgcaaagcgggctgatgaggctctcgacgtgctgcttcacaggatgcctgagctgggctgcactcccaacgtggtggcatataccacggtcatccacggcttctttaaggaaggccaagtaggcaaggcatgcaatctgttccatggaatggcgcagcagggtgttgcgcctaatttggtgacatataactcggttattgatgcgttgtgcaaggccaaagcaatggacaaggcagagtatttccttggtcagatggttgatgatggtgttgtacctgataatgtgacatataatagcctcatccatggatattcctcttcaggccactggaaggaggcagttagggtattcaaagagatgacaagtcggagggttacagcagatgtgcatacttacaacatgtttatgacctttctttgcaaacatggaagaagcaaagaagctgcaggaatttttgataccatggctatgaagggcctgaaacctgacaacgtttcatatgctattctccttcatgggtatgccactgaaggatgcttagttgatatgattaatctcttcaattcaatggaaagagattgtattctacctgactgtcgtatcttcaacatactgattaatgcatatgctaaatctgggaagcttgataaggctatgcttatcttcaatgaaatgcagaaacaaggagtgagtccaaatgcagtcacatattcaactgtaatagatgcattttgcaaaaagggtcagttggacgatgctatgataaagtttaatcagatgattgatacaggagtacgacagggcacagctatttatggttctctaatccagggtttttgtacacacggcgatttggtgaaagcaaaggaattggctactgaaatgatgaacaaaggtatacctcctcctgatattaagttcttccattcaatcatgcagaacctttgcacagaaggaagggtaatagaagcacgggatgtccttggcttgatagcgcacataggtatgaggcctaatgtttgcacatttaatatactgatcggtggatattgcctagtcggcaagatggaggatgcctcaaaaatatttgacgatatgatgtcatatggcttagaaccttctaatattacgtatggtatacttattaatggctattgcaaaaacgaaaggattaacgatgggctgattctgttcaaagaaatgttgcgcaagggacttaaacctacaacttttaattacaacgtcatactagatggattatttttggctggacgaactgttgctgcaaaggaaaagtttgatgagatggttgaatttggagtaagtgtgtgcattgatacatattcgatagttcttggtggactttgtagaaataattgtagcggcgaagcaatcacgctattccagaaattaagcacaatcgatgtgaaattcaatattacaattgtcaatataatgattgatgccttctacagggttcagcgaaaccaagaagccaaggatttgtttgctgcagtatcagccaatggtttggtagctaatgtctttacctacaccataatgatgaaaaatcttataaaagaagggtcagtggaagaagctgacgatctctttttatcaatggagaagagcggctgtactgctgactcttatatgttaaatcttatcgtcagaatgttactgggaaaaggagagatagtcaaggctgggaattatatatctaaaattgatgcaaagagctactcacttgaagctaaaactgtttcgctgcttatctctctcttttcagggaaagggaaatatagagaacacataggattgctccctgcaaagtatcggtttcgtgaagaagcagccacagttgtg

SEQ ID NO: 1852 - DNA, 804 bp, Triticum aestivum
atgcctcgcttctccgccgccacgcccatgtcgccactccgcctccgcctccgcctccgcgcccgccactcctcctccacctcccattcctcacgcagctgggatccccactccgccttcgccgccgccgcggagcgtgcgcgctctggcaacctcaccccggaggacgcacaccacctgttcgacgaattgctccggcagggcaatcctgtccaggaccgccccttgaacaaacttctctccgccctcgcccgtgctccggcgtccgcgacctgcagaaacggccctgcactcgcggtcgccctcttcagccgcatatcccaaggtgcccgccgacgtgtggcagagccaacggcctgcacctacggcatcctcatggactgctgctgccgcgcacaccgcctcgatctggtgttcgctttcttcggccgtctcctcaggacgggacttaaggcaggcgtcattcaagtttgcactcttctcaagggcctctgccgcgcaaagcgggctgatgaggctctcgacgtgctgcttcacaggatgcctgagctgggctgcactcccaacgtggtggcatataccacggtcatccacggcttctttaaggaaggccaagtaggcaaggcatgcaatctgttccatggaatggcgcagcagggcgttgcgcctaatttggtgacatataactcggttattgatgcgttgtgcaaggccaaagcaatggacaaggcagagtatttccttggtcagatggttgatgatggtgtcgtacctgataatgtgacatataatagcctcatccat

SEQ ID NO: 1853 - DNA, 2376 bp, Triticum aestivum; identical to SEQ ID NO: 1851

SEQ ID NO: 1854 - DNA, 2370 bp, Triticum aestivum
atgcctcgcttctcctccaccacgcccatgtcgccactccgcctccgcctccgcctccgactcggcgcccgccactcctcctccacctcccattcctcacgcagctgggatccccactccgccttcgctgccaccgcggagcgtgcgcgctctggcaacctcaccccggaggacgcacaccacctgttcgacgaattgctccggcagggcaatcctatccaggaccgccccttgaacaaacttctctccgccctcgcccgtgctccggcgtccgcgacctgcagaaacggccctgcactcgcggtcgccctcttcagccgcatatcccaaggtgcccgccgacgtgtggcagagccaacggcctgcacctacggcatcctcatggactgctgctgccgcgcacaccgcctcgatctggtgttcgctttcttcggccgtctcctcaggacgggacttaaggcaggcgtcattcaagtttgcactcttctcaagggcctctgccgcgcaaagcgggctgatgaggctctcgacgtgctgcttcacaggatgcctgagctgggctgcactcccaacgtggtggcatataccacggtcatccacggcttctttaaggaaggccaagtaggcaaggcatgcaatctgttccatggaatggcgcagcagggtgttgcgcctaatttggtgacatataactcggttattgatgcgttgtgcaaggccaaagcaatggacaaggcagagtatttccttggtcagatggttgatgatggtgttgtacctgataatgtgacatataatagcctcatccatggatattcctcttcaggccactggaaggaggcagttagggtattcaaagagatgacaagtcggagggttacagcagatgtgcatacttacaacatgtttatgacctttctttgcaaacatggaagaagcaaagaagctgcaggaatttttgataccatggctatgaagggcctgaaacctgacaacgtttcatatgctattctccttcatgggtatgccactgaaggatgcttagttgatatgattaatctcttcaattcaatggaaagagattgtattctacctgactgtcgtatcttcaacatactgattaatgcatatgctaaatctgggaagcttgataaggctatgcttatcttcaatgaaatgcagaaacaaggagtgagtccaaatgcagtcacatattcaactgtaatagatgcattttgcaaaaagggtcagttggacgatgctatgataaagtttaatcagatgattgatacaggagtacgacagggcacagctatttatggttctctaatccagggtttttgtacacacggcgatttggtgaaagcaaaggaattggctactgaaatgatgaacaaaggtatacctcctcctgatattaagttcttccattcaatcatgcagaacctttgcacagaaggaagggtaatagaagcacgggatgtccttggcttgatagcgcacataggtatgaggcctaatgtttgcacatttaatatactgatcggtggatattgcctagtcggcaagatggaggatgcctcaaaaatatttgatgatatgatgtcatatggcttagaaccttctaatattacgtatggtatacttattaatggctattgcaaaaacgaaaggattaacgatgggctgattctgttcaaagaaatgttgcgcaagggacttaaacctacaacttttaattacaacgtcatactagatggattatttttggctggacgaactgttgctgcaaaggaaaagtttgatgagatggttgaatttggagtaagtgtgtgcattgatacatattcgatagttcttggtggactttgtagaaataattgtagcggcgaagcaatcacgctattccagaaattaagcacaatcgatgtgaaattcaatattacaattgtcaatataatgattgatgccttctacagggttcagcgaaaccaagaagccaaggatttgtttgctgcagtatcagccaatggtttggtagctaatgtctttacctacaccataatgatgaaaaatcttataaaagaagggtcagtggaagaagctgacgatctctttttatcaatggagaagagcggctgtactgctgactcttatatgttaaatcttatcgtcagaatgttactgggaaaaggagagatagtcaaggctgggaattatatatctaaaattgatgcaaagagctactcacttgaagctaaaactgtttcgctgcttatctctctcttttcagggaaagggaaatatagagaacacataggattgctccctgcaaagtatcggtttcgtgaagaagcagccacagttgtg

SEQ ID NO: 1855 - DNA, 2319 bp, Triticum aestivum
atgtcaaacacccgtctgtcctccaccttcacctcctccttgaaggctccttcacgaaaaccacgagccccccgcctcgccgccttggctgccgccacggagcgcgtccgcgctggaacgctaactcggcaggacgcgcgccagctgttcgacgaattgctgagccaagccgcgacagtcccagtacgcaccctgaacaactttcttgccgcactctcccgtgctccaccctcagctgcctgcagcgatggcccgggccttgccattgccctcttcaaccacatgtcccaaggcgctggtgcacgggtggtgtcgcccacgctctgtacctattccatcctcatggactgctgctgtcgtgcacgccgcccggacttggtggtttccttctttggccgcctccttaggttggggctgcgcttgaatgtcatctccttcaacaatctcctcaaggggctctgccaggccaagcgtacaaatgaggcggtggacttgctgctccaccggacacctgaactggactgtgtgcctaatgtcttctcgtacagcatcgtaatcaacgggtgttttaaacaaggtgaagtagacaaagcgtgcaatctcttcaatcagatgccccaactgggagttcaacctgatgtggtgatctacaactcaattatcgacgcactaagcaaatccggagcaatggacaaggcagaagtggtccttcggcaaatggttgatcaaggcattggaccaaacgtcatgacatatactagcctgatccatggatattccgcttcgggtcagtggaaggcggcagttagagtattcaaggaaatggtaagtgttggtgttcaaccaaatgctgtcgctttgaactcatttatggattcactttgcaagcatagaaggacaaaggaagctagagatatttttgactccatggctgcaaagggccagaaacctgatattttctcctattctactatgcttaacgggtatgtgaaagaaggatgctttgatgatatgactggtctcttcaatttgatgctacagaatggtgttgtacgaaaccaccatattttcaacatactgatcaatgcatatgctaaacgtggactgatggatgaggctatgcacatgttcgaagtaatgaggcaacaaggagtaaacccagatgtatttagctatcaaattgtaatggattcactttgcaaaatgggtaggatggatgctgctctggacaaatttaatcagatggtcaatcaaggagtttcacctaacatagttgtttaccgatgcctggttctgggttcttgctctcatggtgattttgtgaaagccaaggaattgatttctgaagcagttaatagaggtttgtgttctaacagtgtgttcttctatcctgtaataaacaatctgagcaaagaaggaaaggtaaaggaggcacaggatatgtttgacttcattgtaggtattggtcagcggcctgatgttattatgtaccattcactgatggatggatattgccttgttggcaaggtggaggaagcactgagagtacttgatgctatgaagtttgctggcctccaacctactgctgttacatacgctatacttcttaatggctactgtaaaagtggaaggattgctgctgggttgagtcttttcatggaaatgtcactcagcggggttaagcccactactattatgtacaacattatacttgatgggctgtttcgctccgggagaacagtttctgcaaaggaaaaattccgtacgatgagcgaaagtggcataccagtgggcattgacacatacaacatagttcttagtggactttgtaaaaataattgcgctggtgaagcaatagagctgttcaagaaactacgtgcaatgaatgtgaagattgatgtcaaaacactcactatcatgatttctgcaatgtttaaaagtaggagaattgaagaagccaaggagttgtttgctactatatcagccatcgggttggtgccttctgttgtgacttacagtgtaatgatgacgaatttcataaaagaagggtcgctggcagaggctgatgatatgtttttagcaatggagaaggctagctgtgctcccaactccatcctgctaaatcaagtggtcagggcgttgctggaaaaaggtgtagttgtaaaggctgcaacttatctggctaaacttgatgcaaaacagctgtcacttgaagcttcaacggtttcgttaatactatctctcttctcaaggaaagggaaattaagggagcatgtaaaattgcttccggtgaagtaccagcctcctgagatgttggac

SEQ ID NO: 1856 - DNA, 2472 bp, Triticum aestivum
atgtcccgcctccgccactccacctccaccgcgccggtgccccacctccgcctcctccgctgccgctcctcctccatctccaccttgccgccgtcacgctcatcgtctccccatgcagcctttgccgcagccacagagcgcgtcagcgctgggacgctcagcccggaagacgcacaccgcctgttcgacgaattgctacggcaggccactccggtccccgcgcgctccctgaacggcttcctcacggccctctcccgtgcgccggacaccggcgcctgcagagacggccccgccctcgccctctccctcttcaaccgcacccgccgagaagcggccggctcccgggtggtgtcgtccacaatcttcacctacggcatcctcatgaactgctgctgccgcacgcgtcgtccggagcttgggcttgccttctttgggcgcgtcctcaggatgggcctgaagacaaacgtggtcgtcgccaccacggtcctccagtgcctctgcggcgccaaacggacagacgaggctgtggacatcctgctacatcggatgtccgagctcgggtgcgtgcctgacgacttctcatacaacattgttctgaagagcttatgcgatgatagcaggagccagcgggcactcgacctgctccggatgtgggagaatgaacgaggtgtctgctcccccaacgtatatacgtataacacggtcatccacggcttctttaaggaaggtgaagtaagcaaggcatgtaatctatttcatgaaatggcgcagaaaggggttccgcccaatgtggtgacatatagcttgactattgatgcgctgtgcaaggccagagctatggacaaagcacagttgttcctccggcagatgattcataaaggtgttcgaccgaacattgtgacatataatgtcatgatccatggatattccactcttggccagtggaaagaagcaggtaaaatgttcagagaaatgacaggacagggactcataccagatattgttacttggacctcgttcatggcctctctctgtaagcatggaagaaccaaagaagctgccgaattttttgattccatgactgccaagggccacaagcctgatttggtcatgtatcatgttctgctccatgggtatgcaaccgaaggatgctttgctgatatgattaatctctttaattcaatggcaaccaaaggtattgtacccgatcgtcaggttttcaatattttaattgatgcacatgctaaacatggaatgatggatgaagctatgcacatatttactggaatgcagggacaaggagtgtgtccagatgtatggacctattcaactctaatatctgcactttgcagaatgggtaggctggctgatgccatggataacttcagtcagatgattggtaagggagtacaaccgaacacagttgtttatcactccctaattcagggtttctctacacatggtgatttgaggaaagcaaatgagttggtttatgaaatgacgaacaaaggtattccttgtccaaacattgcattcttcagttctataatggacagtctatgcaaagaaggaagggttatggatgcacatgatatcttccacttggttacagacataggtctgaaacctaacatcattacgtttaatacgctgattgatggacattgcttagtcggtgagatggagaaagcatttggagtacttgattccatggtatcagctggcattgaggctgatgtttttacatataatacacttgcttatggctattgtagatgtggaaggattgatgatgggttgattctattcagagaaatgttgcaaaacaaacctaaacccacaacaatcacatataacatcatactggatgggttatttcgtgctgggagaacatttgctgcaaagaaaatgttcgttgagatgatcgaaacgggaataacagtgagcatttccacatacagtataatacttggaggactttgtaggaataattgctctgacgaagcgatcaccctatttcagaaattaggagcaatgaatgtgaagtttgatattaaaatactcaataccatgatcaatgccatgttcaaggttcggagaagagaagaagctaacggtttgtttgctgcaatatcagccagtgggatggtacctaatacttctacctacagcgtaatgataggaaatcttctaaaagaaggatcagtggaagaagctgaaaatatgttctcattaatggagaagagtggttgtgctccagactctcgtcttataaataatatcatcagaatattgttggaaaacggtgacatcgtcaaggctggaaattatatgtctaaagttgatggcaagagcatctcacttgaagcttcaactacttcgttgttgatgtgtctcttttcaagtaaagggaaatatcgggaacaaatcagtttgctccctgtaaattaccaatttttcaatggagtcggt

SEQ ID NO: 1857 - DNA, 663 bp, Triticum aestivum
atgcctcgcttctcctccaccacgccgctgtcgccactccgccgccgcctccaccactcctcctccacctcccattcctcacgcagctgggagccccacgccgccttcgccgccgccacggagcgtgcgcgctctggcaacctcaccctggaggacgcacaccacctgttcgacgaattgctccggcagggcaatcctgtccaggaccgccccttgaacaaacttctctccgccctcgcccgtgctccggcgtccgcggcctgcagaaatggccctgcactcgcggtcgccctcttcagccgcatatcccaaggtgcccgccgacgagtggcggagccaacggtctgcacctacggcatcctcatggactgctgctgccgcgcacaccgcctggatctggcgctcgccttcttcggccatctcctcaagacgggcctggaggtagaccaagtcgtcttcaacaccctcctcaaaggcctttgccacgcaaagcgggcggatgaggctctggacgtgctgcttcacaggatgactgagctgggctgcacccccaacgtggtggcgtacaacaccataatccatggcttctttaaggaaggtcaagtaagcaaggcctgcaatctgttccatgaaatggcgcagcaggcgttccgcctaatgtgg

SEQ ID NO: 1858 - DNA, 1644 bp, Triticum aestivum
atggacaaggcagaggtggtccttcgtcaaatgattgatcgtagtgttggacctaatagcgtgacgtatagtagcctcatccatggatattcctcttcaggccactggaaggaggcagttagggtattcaaagagatgacaagtcggagggttacaccaaatgtgcatacttacaacatgtttataacctttctttgcaaacatggaagaagcaaagaagctgcaggaatttttgattccatggctatgaagggcctgaaacctgacgacgtttcatatgctattctccttcatgggtatgccaccgaaggatccttagttgatatgattaatctcttcaattcaatggaaagagactgtatcctaccagactgtcgtatcttcagcatactgattaatgcatatgctaaatctgggaaggttgataaggttatgcttatcttcaaaaaaatgcagaaacaaggagtgagtccagatgcagtcacatattcaaccctaatagatgcattttgtaaaaagggtcggttggacgatgctatgataaagtttaatcagatggttgatacaggagtacgacagggcacagctgtttatggttctctaatccagggtttttgtacacacggtgatttggtgaaaggaaaggaattggttactgaaatgatgaacaaaggtatacctcctcctgatattaagttcttccattcaatcatgcagaacctatgcacagaaggaagggtaatagaagcacgggatatccttggcttgatagcacacataggtatgaggcctaatgtttgcacatttaatatactgatcggtggatactgcctagtccgcaagatggagggtgcctcaaaaatatttcatgatatgatgtcatatggtttagaaccttctaatattacgtatggtatacttattaatggctattgcaaaaacttaaggattgacgatgggctgattctgttcaaagaaatgttgcgcaagggacttaaacctacaactttaaattataacattatactggatggcttatttctggctggacgaactgctgctgcaaaggaaaggttccatgagatggttgaatctggagcacatgtgtgcattgatacatactgtatagttcttggtggactttgtagaaataactgcagtagcgaagcaatcaccctattcgggaaattaagtgcaatgaatgtgagatttgatattacaattgtcaatatcattattggtgcattctacagggtcgagagaaaccaagaggctaaggatttgtttgctgctatgccagccaattgcttggttcctaatgctgttacctacaccataatgatgacaaatcttataaaagaaggttcagtggaagaagctgacaatctttttttatcgatggagaagagcggctgtactgccaactcttgcctgttaaatcatgtcatcaggaggttactggaaaaaggagagatagtcaaggctggaaattatatgtataaagttgatgcaaagaactactcacttgaagctaaaactgtttcactgctgatgtctctgtttacaaggaaagggaaatatagagaacacatcaaattgctccctgcaaagtatcagtttctggaagaagcagccacagttgaa

SEQ ID NO: 1859 - DNA, 2352 bp, Triticum aestivum
atgcctcgcttctcctccaccacgccgctgtcgccactccgccgccgcctccgccactcctcctccacctcccattcctcacgcagctgggagccccacgccgccttcgccgccgccacggagcgtgcgcgctctggcaacctcaccctggaggacgcacaccacctgttcgacgaattgctccggcagggcaatcctgtccaggaccgccccttgaacaaacttctctccgccctcgcccgtgctccggcgtccgcggcctgcagaaatggccctgcactcgcggtcgccctcttcagccgcatatcccaaggtgcccgccgacgagtggcggagccaacggtctgcacctacggcatcctcatggactgctgctgccgcgcacaccgcctggatctggcgctcgccttcttcggccatctcctcaagacgggcctggaggtagaccaagtcgtcttcaacaccctcctcaaaggcctttgccacgcaaagcgggcggatgaggctctggacgtgctgcttcacaggatgactgagctgggctgcacccccaacgtggtggcgtacaacaccataatccatggcttctttaaggaaggtcaagtaagcaaggcctgcaatctgttccatgaaatggcgcagcagggcgttccgcctaatgtggtgacatataattcagttatcgatgcgctgtgcaaggccagagccatggacaaggcagaggtggtccttcgtcaaatgattgatcgtagtgttggacctaatagcgtgacgtatagtagcctcatccatggatattcctcttcaggccactggaaggaggcagttagggtattcaaagagatgacaagtcggagggttacaccaaatgtgcatacttacaacatgtttataacctttctttgcaaacatggaagaagcaaagaagctgcaggaatttttgattccatggctatgaagggcctgaaacctgacgacgtttcatatgctattctccttcatgggtatgccaccgaaggatccttagttgatatgattaatctcttcaattcaatggaaagagactgtatcctaccagactgtcgtatcttcagcatactgattaatgcatatgctaaatctgggaaggttgataaggttatgcttatcttcaaaaaaatgcagaaacaaggagtgagtccagatgcagtcacatattcaaccctaatagatgcattttgtaaaaagggtcggttggacgatgctatgataaagtttaatcagatggttgatacaggagtacgacagggcacagctgtttatggttctctaatccagggtttttgtacacacggtgatttggtgaaaggaaaggaattggttactgaaatgatgaacaaaggtatacctcctcctgatattaagttcttccattcaatcatgcagaacctatgcacagaaggaagggtaatagaagcacgggatatccttggcttgatagcacacataggtatgaggcctaatgtttgcacatttaatatactgatcggtggatactgcctagtccgcaagatggagggtgcctcaaaaatatttcatgatatgatgtcatatggtttagaaccttctaatattacgtatggtatacttattaatggctattgcaaaaacttaaggattgacgatgggctgattctgttcaaagaaatgttgcgcaagggacttaaacctacaactttaaattataacattatactggatggcttatttctggctggacgaactgctgctgcaaaggaaaggttccatgagatggttgaatctggagcacatgtgtgcattgatacatactgtatagttcttggtggactttgtagaaataactgcagtagcgaagcaatcaccctattcgggaaattaagtgcaatgaatgtgagatttgatattacaattgtcaatatcattattggtgcattctacagggtcgagagaaaccaagaggctaaggatttgtttgctgctatgccagccaattgcttggttcctaatgctgttacctacaccataatgatgacaaatcttataaaagaaggttcagtggaagaagctgacaatctttttttatcgatggagaagagcggctgtactgccaactcttgcctgttaaatcatgtcatcaggaggttactggaaaaaggagagatagtcaaggctggaaattatatgtataaagttgatgcaaagaactactcacttgaagctaaaactgtttcactgctgatgtctctgtttacaaggaaagggaaatatagagaacacatcaaattgctccctgcaaagtatcagtttctggaagaagcagccacagttgaa

SEQ ID NO: 1860 - DNA, 2334 bp, Triticum aestivum
atgccgaccggccggctgtcctccatcttcaccagcaatgcaacctcctccttcagggctccttcgccacagccacgagcccctctcgccgccttggctgccgccacagagcgcgtgtgtgacggaacgctaagaccggaggaggcgcaccacctgttcgacgaattgctgagccaagccgccgccgtcccggaacgcgggctgaacaactttcttgccgcactagcccatgctccaccctcatctacctgcagcgatggcccgggccttgccatcgccctcttcaaccgcatgtcccgaggcgctggtgcacgggtggtgtcgcccacgctctgtacctattccattctcatggactgctgctgccgtgcaggccgcccggacttggtggttgccttctttggccgcctcctcagattggggctgtgcttgaatgtcatctccttcaacaacctcctcaaggggctctgccaggtcaagcgtacaaatgaggctgtggacttgctgctccaccggacacctgaactggactgtgtgcctaatgtcttctcgtacagcatcgtaatcaacggctgttttaaacaaggcgaagtagacaaagcgtgcaatctcttccatcagatgatccaactgggagttcaacctaatttggtgatctacaactcaattatcgacgcactaagcaaatccggagcaatggacaaggcagaagtggtccttcggcaaatggttgatcaaggaattgaacccaacatcaggacatatactagcctgatacatggatattccgcttcgggtcagtggaaggcggcagctagagtattcaaggaaatggtaagtgttggtgttctaccagatgctgtcgcgtggaactcatttatggattcactttgcaagcatagaaggacaaaggatgctagagttatttttgactccatggctgcaaagggccaaaaacctaatattgtctcctactctattatgctaaatgggtatgctaaagaaggatacttcgatgatatgactggtctcttcaatttgatgctacagaatggtattgtacctaaccaccatgttttcaacatactgatcaatgcatattctaaacgtgggctgatggatgaggctatgcacatgtttgaagtaatgaggcaacaaggagtaaacccagatgtatttggctatcaaattgtaatggattcactttgcaaaatgggtagggtggatgctgctctggacaaatttaatcagatggtcaatcaaggagtttcacccaacaaagctgtttaccaatgcctggttctgggttcttgctctaatggtgattttgtgaaagccaaggaattgatttctgaagcagttaatagaggtctgtgttctaacagtgtattcttctatcctgtaataaacaacctgagcaaagaaggaaaggtgaaggatgcacaggatatgtttgacttcattgtgggtattggtcgtccgcctgatgttattatgtacaattcactgatggatggatattgccttgttggcaaggtggaggaagcactgagagtacttgatgctatgaagtctgctggcctccaacctgatgcttttacatatggtatacttcttaatggctactgtaaaattggcaggatcgccgatggattgagtcttttcagggaaatgtcactcagcggggttaagcccacagctattatgtacaacattatacttgatgggctgtttcgctccgggagagcagtttctgcaaaggaaaaattctgtacgatgagcgaaagtggcataccagtgggcattggcacatacaacatagttcttcatggactttgtagaaacaattgcactgatgaagcaatagagctgttcaacaaattacgtgctatgaaattgaagattaatgtcataacaatcaataccatgatttctgctatgtttaaaactaggagaattgaagaagccaaggatttgtttgctactatatcagccattgggttggtgccttctgttgtgacttacagtgtaatgatgacgaatttcataaaagaagggttgctggcagaggctgatgatatgtttttagcaatggagaaggctggctgtgctcctgactccagactgctaaatcacgtggtcagagtgttgctggagaatggtgcagttgtaaaggctgcaacttatctcgctaaacttgatgcaaaccatctgtcacttgaagtttcaacgatttcattaatagtatctctcttctcaggggaagggaaactaagggagcatgtagagttgcttccagtaaagtaccagcctcctgagagttcggctgacaat

SEQ ID NO: 1861 - DNA, 2334 bp, Triticum aestivum
atgccgaccggccggctgtcctccatcttcaccagcaatgcaacctcctccttcagggctccttcgccacagccacgagcccctctcgccgccttggctgccgccacagagcgcgtgtgtgacggaacgctaagaccggaggaggcgcaccacctgttcgacgaattgctgagccaagccgccgccgtcccggaacgcgggctgaacaactttcttgccgcactagcccatgctccaccctcatctacctgcagcgatggcccgggccttgccatcgccctcttcaaccgcatgtcccgaggcgctggtgcacgggtggtgtcgcccacgctctgtacctattccattctcatggactgctgctgccgtgcaggccgcccggacttggtggttgccttctttggccgcctcctcagattggggctgtgcttgaatgtcatctccttcaacaacctcctcaaggggctctgccaggtcaagcgtacaaatgaggctgtggacttgctgctccaccggacacctgaactggactgtgtgcctaatgtcttctcgtacagcatcgtaatcaacggctgttttaaacaaggcgaagtagacaaagcgtgcaatctcttccatcagatgatccaactgggagttcaacctaatttggtgatctacaactcaattatcgacgcactaagcaaatccggagcaatggacaaggcagaagtggtccttcggcaaatggttgatcaaggaattgaacccaacatcaggacatatactagcctgatacatggatattccgcttcgggtcagtggaaggcggcagctagagtattcaaggaaatggtaagtgttggtgttctaccagatgctgtcgcgtggaactcatttatggattcactttgcaagcatagaaggacaaaggatgctagagttatttttgactccatggctgcaaagggccaaaaacctaatattgtctcctactctattatgctaaatgggtatgctaaagaaggatacttcgatgatatgactggtctcttcaatttgatgctacagaatggtattgtacctaaccaccatgttttcaacatactgatcaatgcatattctaaacgtgggctgatggatgaggctatgcacatgtttgaagtaatgaggcaacaaggagtaaacccagatgtatttggctatcaaattgtaatggattcactttgcaaaatgggtagggtggatgctgctctggacaaatttaatcagatggtcaatcaaggagtttcacccaacaaagctgtttaccaatgcctggttctgggttcttgctctaatggtgattttgtgaaagccaaggaattgatttctgaagcagttaatagaggtctgtgttctaacagtgtattcttctatcctgtaataaacaacctgagcaaagaaggaaaggtgaaggatgcacaggatatgtttgacttcattgtgggtattggtcgtccgcctgatgttattatgtacaattcactgatggatggatattgccttgttggcaaggtggaggaagcactgagagtacttgatgctatgaagtctgctggcctccaacctgatgcttttacatatggtatacttcttaatggctactgtaaaattggcaggatcgccgatggattgagtcttttcagggaaatgtcactcagcggggttaagcccacagctattatgtacaacattatacttgatgggctgtttcgctccgggagagcagtttctgcaaaggaaaaattctgtacgatgagcgaaagtggcataccagtgggcattggcacatacaacatagttcttcatggactttgtagaaacaattgcactgatgaagcgatagagctgttcaacaaattacgtgctatgaaattgaagattaatgtcataacaatcaataccatgatttctgctatgtttaaaactaggagaattgaagaagccaaggatttgtttgctactatatcagccattgggttggtgccttctgttgtgacttacagtgtaatgatgacgaatttcataaaagaagggttgctggcagaggctgatgatatgtttttagcaatggagaaggctggctgtgctcctgactccagactgctaaatcacgtggtcagagtgttgctggagaatggtgcagttgtaaaggctgcaacttatctcgctaaacttgatgcaaaccatctgtcacttgaagtttcaacgatttcattaatagtatctctcttctcaggggaagggaaactaagggagcatgtagagttgcttccagtaaagtaccagcctcctgagagttcggctgacaat

SEQ ID NO: 1862 - DNA, 2334 bp, Triticum aestivum; identical to SEQ ID NO: 1860

SEQ ID NO: 1863 - DNA, 2334 bp, Triticum aestivum; identical to SEQ ID NO: 1860

SEQ ID NO: 1864 - DNA, 2334 bp, Triticum aestivum; identical to SEQ ID NO: 1860

SEQ ID NO: 1865 - DNA, 2334 bp, Triticum aestivum; identical to SEQ ID NO: 1860

SEQ ID NO: 1866 - DNA, 2310 bp, Triticum aestivum
atgccaaccgcccgcctgtcctccatctccacctcctccttcagggctccttcacgagcccccctcgccgccttggctgccgccacggaacgcgttcgcgctggaacgctaagccgggaggatgcacaccacctattcgacgaattgcaaggccaagccgccgccgtcccagtacgcacgctgaacaactttcttgccgcactagcccgtgctccgccctcatccgcctgcagcgatggccctggccttgccatcgccctcttcaaccgcatgtcccgaggcgctggtgcacgggtggtgtctcccacgctctgtacctattccatcctcatggactgctgctgccgtgcaggccgcccggacttggtggttgccttcttctgccgcctcctcaggttggggctgcgctttgaggaggtcatctccttcaacaacctcctcaaggggctttgccaggccaagcgctcaaatgaggctttagatctgctgctccaccggatgcccgaactggactgtgcgcctgatgtcttctcgttcaacatagtaatcaacggctgccttaaagaaggtgaagtagacaaagcatgcaatctcttccatgagatgccccaactgggagttcaacctgatgtggtgacctacaactcaattattgacgcactaagcaagtccggagcaatggacaaggcagaagtgctccttcggcaaatggttgatcaaggaattgaacccaatatcaggacatatagctgtctgatccatggatattctacttttggtcagtggaaggaggcacttagggtattcaaagaaatggcaagtcttggtgttgtaccagacgttgtcacgttaagctcattaatcgattccctttgcaagcacagaaggacaaagcaagctagagaaatttttgactccatggctgcaaagggcctgaaacctgatatcgtctcctactctactatgcttaacgggtatgtcaaagaaggatccttcgaggatatgactgatctcttcaattcgatggtacggaatggtattgtacctaaccaccatattttcaacatactgatcaatgcatatgctaaacgtggactgatggatgaggctatgcacatgttcgaagtaatgaggcaacaaggagtaaacccaaatgtaattgactatctagtaataatggattcactttgtaaaatgggtaggatggatgctgctctggaaaaatttaatcagatggtcaatcaaggagtttcacctaacaaagctgtttaccaatgcctggttctgggttcttgctctcatggtcattttgtgaaagccaaggaattgatctctgaagcaattaatagaggtctgttttctaacagtgtgttcttctatcctgtaataaacgacctgtgcaaagaaggaaaggtgaaggaggcacatgatatgtttgacttcattgtaggtattggtcagcggcctgatgtgattatgtacaattcactgatggatggatattgccttgttggcaaggtggaggaagcactgagactacttgatgctatgaagtctgctggcctccaacctactggtgttacgtatgctatacttcttaatggctactgtaaaattggaaggatcgccgatggattgagtcttttcagggaaatgtcactcagcggggttaagcccactactattatgtacaacattatacttgatgggctgttttgctctgggagaacagtttctgcaaaggaagaattcgatacgatgagcgaaagtggcataccagtgaacgttcgcacatacaacatagttcttagtggactttgtagaaacaattgcactggtgaagcaatagagctgttcaagaaattacgtgctatgaacgtgaagattaatgtcataacactcaataccatgatttctgctatgtttaaaactaggagaattgaagaagccaaggatttgtttgctactatatcagccatcggattggtgccttctgttgtgacttacagtgtaatgatgacgaatttcataaaagaagggctgctagcagaggctgatgatatgtttttagcaatggagaaggctggatgtgctcccaactccagtttgctaaatcaagtggtcagagtgttgctggaaaaaggtgcagctgtacaggctgcaacttatctagctaaacttgatgcaaaacagctgtcacttgaagcttcaacggtttcgttaatactatctctcttctcaaggaaagggaaattaagggagcatgtaaaattgcttccggtaaagtaccagcctcctgagatgttggac

SEQ ID NO: 1867 - DNA, 2043 bp, Triticum aestivum
atgtcccgaggcgctggtgcacgggtagtgtcgcccacgctctgtacctattccatcctcatggactgctgctgccgcgcaggccgcccggacttggtggttgccttcttcggccgcctcatcaggttggggctgcgcttggagatcatctccttcagcaatctcctcaaggggctctgccaggccaagcgttcaaatgaggctttggacatgctgctccaccggatgcccgaactggattgtgcgcctgatgtcttctcgttcaacatagtaatcaacggctgctttaaagaaggtgaagtagacaaagcgtgcaatctcttccatgagatgccccaactgggagttcaacctgatgtggtgacctacaactcaattattgacgcactaagcaagtccagagccatggacaaggcagaagtggtccttcggcaaatggttgatcaaggcattgaacccaacatcaggacatatactagcctgatccatggatattccacttcgggtcagtggaaagcagcagttaggatattcaaagaaatggcaagtgctggtgttcgaccaaattctgtcacgttgaactcatttattgattccctttgcaagcatagaaagacaaaggaagctagagatatttttgactccatggctgcaaagggccacaaacctgatattttctcctactctactatgcttaatgggtatgcgaaagaaggatgcttcgatgatatgactgatctcttcaattcgatggtacggaatggtatcgtacctgaccaccatgttttcaatatactgatcaatgcatatgctaaacgtggactgatggataaggctatgcacatgttcgaagtaatgaggcaacaaggagtaaacccaaatgtagttgactatctagtagtaatggattcactttgcaaaatgggtaagatggctgctgctatggatatatttaatcagatggtcaatcaaggagtttcacctaacatagttgtttaccgatgcatggttctgggttcttgctctcatggtgattttgtgaaagccaaggaattgatctctgaagcagttaataaaggtctgtgttctaacagtgtgttcttctatcctgtaataaacaacctgtgcaaagaaggaaaggtaatggaggcacaagatatgtttgactttgacttcattgtcggtattggtcagcggcctgatgttattatgtacacttcacttatggatggatattgccttgttggcaaggtggagaaagcactgagagtactcgatgctatgaaatctgctggcctccaacctactgctgttacgtatggtgcacttcttaatggctactgtaaaattggaaagatcgccgatggattgagtcttttcagggaaatgtcactcagcggggttaagcccactactattatgtacaacattatacttgatgggctgttttgctctgggagaccagtttctgcaaaggaagaatttgatacgatgattgaaagtggcataccagtgggcgttgacacatacaacattgttcttagtgggctttgtaaaaataattgcactgatgaagcaatggatctgttcaagaaactacgtgcaacgaacatgaagattgatgtcataacactcaatatcatgatttctgcaatgtttaaaactaggagaattgaagaagccaaggatttgtttgctactatatcagccatcgggctggtgccttgtgttgtgacatacaacttaatgatgacgaacttcataaaagaagggttgctgccagaggctgatgatatgtttttagcaatggagaaggctaactgtgctcccaactccaggctgctaaatcatgtggtcaggttgttgctggaaaaaggtgcagttgtaaaggctgcaacttatctggctaaacttgatgcaaaccatctgtcacttgaagtttcaacgatttcgttaatagtatctctcttctcaggggaagggaaactaagggagcatgtagagttgcttccagtaaagtaccagcctccggagatgtccatc

SEQ ID NO: 1868 - DNA, 2334 bp, Triticum aestivum
atgccaaccggccgcctgtcctccatcttcaccagcaacgcaacctcctccttcagggctccttcgccacaaccacgaccccccctcgccgccttggctgccgccacggaacgcgttcgcgccggaacgctaagccgggaggaggcgcaccacctgttcgacgaattgcaaggccaagccgccgccgtcccggaacgcgggctgaacaactttcttgccgcactagcccgtgctccgccctcatctgcctgcggggatggccctgcccttgccgtcgccctcttcaaccgcatgtcccgaggcgctggtgcacgggtagtgtcgcccacgctctgtacctattccatcctcatggactgctgctgccgcgcaggccgcccggacttggtggttgccttcttcggccgcctcatcaggttggggctgcgcttggagatcatctccttcagcaatctcctcaaggggctctgccaggccaagcgttcaaatgaggctttggacatgctactccaccggatgcccgaactggattgtgcgcctgatgtcttctcgttcaacatagtaatcaacggctgctttaaagaaggtgaagtagacaaagcgtgcaatctcttccatgagatgccccaactgggagttcaacctgatgtggtgacctacaactcaattattgacgcactaagcaagtccagagccatggacaaggcagaagtggtccttcggcaaatggttgatcaaggcattgaacccaacatcaggacatatactagcctgatccatggatattccacttcgggtcagtggaaagcagcagttaggatattcaaagaaatggcaagtgctggtgttcgaccaaattctgtcacgttgaactcatttattgattccctttgcaagcatagaaagacaaaggaagctagagatatttttgactccatggctgcaaagggccacaaacctgatattttctcctactctactatgcttaatgggtatgcgaaagaaggatgcttcgatgatatgactgatctcttcaattcgatggtacggaatggtatcgtacctgaccaccatgttttcaatatactgatcaatgcatatgctaaacgtggactgatggataaggctatgcacatgttcgaagtaatgaggcaacaaggagtaaacccaaatgtagttgactatctagtagtaatggattcactttgcaaaatgggtaagatggctgctgctatggatatatttaatcagatggtcaatcaaggagtttcacctaacatagttgtttaccgatgcmtggttctgggttcttgctctcatggtgattttgtgaaagccaaggaattgatctctgaagcagttaataaaggtctgtgttctaacagtgtgttcttctatcctgtaataaacaacctgtgcaaagaaggaaaggtaatggaggcacaagatatgtttgactttgacttcattgtcggtattggtcagcggcctgatgttattatgtacacttcacttatggatggatattgccttgttggcaaggtggagaaagcactgagagtactcgatgctatgaaatctgctggcctccaacctactgctgttacgtatggtgcacttcttaatggctactgtaaaattggaaagatcgccgatggattgagtcttttcagggaaatgtcactcagcggggttaagcccactactattatgtacaacattatacttgatgggctgttttgctctgggagaccagtttctgcaaaggaagaatttgatacgatgattgaaagtggcataccagtgggcgttgacacatacaacattgttcttagtgggctgtgtaaaaataattgcactgatgaagcaatggatctgttcaagaaactacgtgcaacgaacatgaagattgatgtcataacactcaatatcatgatttctgcaatgtttaaaactaggagaattgaagaagccaaggatttgtttgctactatatcagccatcgggctggtgccttgtgttgtgacatacaacttaatgatgacgaacttcataaaagaagggttgctgccagaggctgatgatatgtttttagcaatggagaaggctaactgtgctcccaactccaggctgctaaatcatgtggtcaggttgttgctggaaaaaggtgcagttgtaaaggctgcaacttatctggctaaacttgatgcaaaccatctgtcacttgaagtttcaacgatttcgttaatagtatctctcttctcaggggaagggaaactaagggagcatgtagagttgcttccagtaaagtaccagcctccggagatgtccatc

SEQ ID NO: 1869 - DNA, 666 bp, Triticum aestivum
atgctgcacaagggacttaaacctacaacttttaattataacgtcattctggatggattatttctggctagacaaactgttgcttcaaaggtgaagtttcatgagatggctgaatctggagtaagtgtgtgcattgatacatactctatagttcttggtggactttgtagaaataattgcatcggtgaagcaatcacgctatttcagaaattaagtacaatgaatgttaaattcaatattgcaattgtcaatatcatgattggtgcattcttcagggttcggcgaaaccaggaagctaaggatttgtttgctgcagtatcagccaatggtttggtagctaatgtctttacctacactgtaatgatgataaatcttatagaagaagggtcactggaagaagctgacactctctttttatcaatgaagaagagcggctgtactgccaactcttgtatgttaaatcatattatcagaaggttactggaaagaggagagatagtcaaggctggaaattatatgtcgaaagttgatgcaaagagctactcacttgaagctaaaactgttttgctgctgatctctctcttttcagggaatgggaaatatagagaacacataaaattgctccctatgaagtatcagtttctcgaagaagcagccacagttgaa

SEQ ID NO: 1870 - DNA, 984 bp, Triticum aestivum
atgatgaagaaaggtatgcttcctcctgatattatgttcttcagttcaatcatgcagaacctatgcacagaaggaagggtaatagaagcacgagatatccttgacttgatagtgtgcattggtatgaggcctgatgttttcatatttaatatactgatcggcggatactgcctagtccgcaagatggcagatgcatcaaaaatatttgatgatatggtgtcatatggtttagaaccttgtaatattacgtatggtatacttattaatggctattgcaaaaacggaaggattgatgacgggcttattctgttcaaggagatgctgcacaagggacttaaacctacaacttttaattataacgtcattctggatggattatttctggctagacaaactgttgcttcaaaggtgaagtttcatgagatggctgaatctggagtaagtgtgtgcattgatacatactctatagttcttggtggactttgtagaaataattgcatcggtgaagcaatcacgctatttcagaaattaagtacaatgaatgttaaattcaatattgcaattgtcaatatcatgattggtgcattcttcagggttcggcgaaaccaggaagctaaggatttgtttgctgcagtatcagccaatggtttggtagctaatgtctttacctacactgtaatgatgataaatcttatagaagaagggtcactggaagaagctgacactctctttttatcaatgaagaagagcggctgtactgccaactcttgtatgttaaatcatattatcagaaggttactggaaagaggagagatagtcaaggctggaaattatatgtcgaaagttgatgcaaagagctactcacttgaagctaaaactgttttgctgctgatctctctcttttcagggaatgggaaatatagagaacacataaaattgctccctatgaagtatcagtttctcgaagaagcagccacagttgaa

SEQ ID NO: 1871 - DNA, 1461 bp, Triticum aestivum
atgaggattgtcctcaaaagtgccgagaaggactttgtcctatccwcyctcgycmccmtcsymytscwcwsskyttgckmastacacacaaaggccatgcctcgcttctcctccagcacgccaatgtcgccaccacgcctccgcctcctcctcctcctccgacttggcgcccgccactcctcctccacctctcatccctcacgcatctgggatccccacgccgccttcgccgccgcgacgcagcgggctcgctctggcacgctcaccacggaggacgcacaccacctgttcgaagaattgctgcggcagggcaatcctgtccaggagcgtcccttgactaactttctggctgcccttgcccgcgcgcccgcgtccccattctgcagcgatggccccgccctggccgtcgccctcttcagccgtttgtcccgaggcgccggacgacgggtggcacagccaaatgtcttcacctatggagtcctaatggactgctgctgccgtgcgcgccgcttggatgtagcgatcgccttcttcgcccatctcctcaagacgggactggaggcaggccaagtcgttttcggcaccctcctcaagggactgtgccacgcaaagcactcagatgaggctttggacgtggtgcttcacaggatgcctgagctaggctgcacccccgacgtggtggcctataccacggtcatccacggcttcttgaaggaaggccaagtaggcaaggcatgcaatctattccatggaatggcgcagcagggcgttgcgcctgatgtggtgacatatagctcagttattgatgcgctgtgcaaggccagagcaatggacaaggcagagtatttccttcgtgaaatggttgataatggtgtcgtacctaataatgtgacatataatagcctcatccatggatattcctctttgggccatcagaaggaggctgttagggtgctgaaagaaatgacaagacagggtatcatacctgatgtttttacttgcaactcggtcatggcctccctttgcaagaacggaaaaagcaaagaagctgcaaaaatgtttgattcaatgtccatgaagggcctgaaacctaacaccgtttcatatgttattctccttcatgggtatgccactgaaggatgcctagttgacatgatcaatctcttcaattccatggcaacagactgtattctacctaactgtcatatattcaacatactgatttatgcatatgctaaatctgggaagctcgacaaggctatgcttatatttaaagaaatgcagaaacaaggagtgagtccagatgcagtcacatattcaaccgtaatacatgcattttgcaaaaagggtaggttggatgatgctgtgataaagtttaatcagatgattgatacaggagtacgaccggacgcatctgtttatcgttccctaatccagggtgaaagcaaaggaatatgttac

SEQ ID NO: 1872 - DNA, 984 bp, Triticum aestivum; identical to SEQ ID NO: 1870

SEQ ID NO: 1873 - DNA, 2376 bp, Triticum aestivum
atgcctcgcttctcctccagcacgccaatgtcgccaccacgcctccgcctcctcctcctcctccgacttggcgcccgccactcctcctccacctctcatccctcacgcatctgggatccccacgccgccttcgccgccgcgacgcagcgggctcgctctggcacgctcaccacggaggacgcacaccacctgttcgaagaattgctgcggcagggcaatcctgtccaggagcgtcccttgactaactttctggctgcccttgcccgcgcgcccgcgtccccattctgcagcgatggccccgccctggccgtcgccctcttcagccgtttgtcccgaggcgccggacgacgggtggcacagccaaatgttttcacctatggagtcctaatggactgctgctgccgtgcgcgccgcttggatctagcgatcgccttcttcgcccatctcctcaagacgggactggaggcaggccaagtcgttttcggcaccctcctcaagggactctgccacgcaaagcactcagatgaggctttggacgtggtgcttcacaggatgcctgagctaggctgcacccccgacgtggtggcctataccacggtcatccacggcttcttgaaggaaggccaagtaggcaaggcatgcaatctattccatggaatggcgcagcagggcgttgcgcctgatgtggtgacatatagctcagttattgatgcgctgtgcaaggccagagcaattgacaaggcagagtatttccttcgtgaaatggttgataatggtgtcgtacctaataatgtgacatataatagcctcatccatggatattcctctttgggccatcagaaggaggctgttagggtgctgaaagaaatgacaagacagggtatcatacctgatgtttttacttgcaactcggtcatggcctccctttgcaagaacggaaaaagcaaagaagctgcaaaaatgtttgattcaatgtccatgaagggcctgaaacctaacaccgtttcatatgttattctccttcatgggtatgccactgaaggatgcctagttgacatgatcaatctcttcaattccatggcaacagactgtattctacctaactgtcatatattcaacatactgatttatgcatatgctaaatctgggaagctcgacaaggctatgcttatatttaaagaaatgcagaaacaaggagtgagtccagatgcagtcacatattcaaccgtaatacatgcattttgcaaaaagggtaggttggatgatgctgtgataaagtttaatcagatgattgatacaggagtacgaccggacgcatctgtttatcgttccctaatccagggtttttgtacacatggcgatttggtgaaagcaaaggaatatgttactgaaatgatgaagaaaggtatgcttcctcctgatattatgttcttcagttcaatcatgcagaacctatgcacagaaggaagggtaatagaagcacgagatatccttgacttgatagtgtgcattggtatgaggcctgatgttttcatatttaatatactgatcggcggatactgcctagtccgcaagatggcagatgcatcaaaaatatttgatgatatggtgtcatatggtttagaaccttgtaatattacgtatggtatacttattaatggctattgcaaaaacggaaggattgatgacgggcttattctgttcaaggagatgctgcacaagggacttaaacctacaacttttaattataacgtcatactggatggattatttctggctagacaaactgttgctgcaaaggtgaagtttcatgagatggctgaatctggagtaagtgtgtgcattgatacatactctatagttcttggtggactttgtagaaataattgcatcggtgaagcaatcacgctatttcagaaattaagtacaatgaatgttaaattcaatattgcaattgtcaatatcatgattggtgcattcttcagggttcggcgaaaccaggaagctaaggatttgtttgctgcagtatcagccaatggtttggtagctaatgtctttacctacactgtaatgatgataaatcttatagaagaagggtcactggaagaagctgacactctctttttatcaatgaagaagagcggctgtactgccaactcttgtatgttaaatcatattatcagaaggttactggaaagaggagagatagtcaaggctggaaattatatgtcgaaagttgatgcaaagagctactcacttgaagctaaaactgttttgctgctgatctctctcttttcagggaatgggaaatatagagaacacataaaattgctccctatgaagtatcagtttctcgaagaagcagccacagttgaa

SEQ ID NO: 1874 - DNA, 1365 bp, Triticum aestivum
atgcctcgcttctcctccagcacgccaatgtygccaccacgcctccgcctcctcctcctcctccgacttggcgcccgccactcctcctccacctctcatccctcacgcatctgggatccccacgccgccttcgccgccgcgacgcagcgggctcgctctggcacgctcaccacggaggacgcacaccacctgttcgaagaattgctgcggcagggcaatcctgtccaggagcgtcccttgactaactttctggctgcccttgcccgcgcgcccgcgtccccattctgcagcgatggccccgccctggccgtcgccctcttcagccgtttgtcccgaggcgccggacgacgggtggcacagccaaatgttttcacctatggagtcctaatggactgctgctgccgtgcgcgccgcttggatctagcgatcgccttcttcgcccatctcctcaagacgggactggaggcaggccaagtcgttttcggcaccctcctcaagggactctgccacgcaaagcactcagatgaggctttggacgtggtgcttcacaggatgcctgagctaggctgcacccccgacgtggtggcctataccacggtcatccacggcttcttgaaggaaggccaagtaggcaaggcatgcaatctattccatggaatggcgcagcagggcgttgcgcctgatgtggtgacatatagctcagttattgatgcgctgtgcaaggccagagcaattgacaaggcagagtatttccttcgtgaaatggttgataatggtgtcgtacctaataatgtgacatataatagcctcatccatggatattcctctttgggccatcagaaggaggctgttagggtgctgaaagaaatgacaagacagggtatcatacctgatgtttttacttgcaactcggtcatggcctccctttgcaagaacggaaaaagcaaagaagctgcaaaaatgtttgattcaatgtccatgaagggcctgaaacctaacaccgtttcatatgttattctccttcatgggtatgccactgaaggatgcctagttgacatgatcaatctcttcaattccatggcaacagactgtattctacctaactgtcatatattcaacatactgatttatgcatatgctaaatctgggaagctcgacaaggctatgcttatatttaaagaaatgcagaaacaaggagtgagtccagatgcagtcacatattcaaccgtaatacatgcattttgcaaaaagggtaggttggatgatgctgtgataaagtttaatcagatgattgatacaggagtacgaccggacgcatctgtttatcgttccctaatccagggtgaaagcaaaggaatatgttac

SEQ ID NO: 1875 - DNA, 2376 bp, Triticum aestivum
atgcctcgcttctcctccagcacgccaatgtcgccaccacgcctccgcctcctcctcctcctccgacttggcgcccgccactcctcctccacctctcatccctcacgcatctgggatccccacgccgccttcgccgccgcgacgcagcgggctcgctctggcacgctcaccacggaggacgcacaccacctgttcgaagaattgctgcggcagggcaatcctgtccaggagcgtcccttgactaactttctggctgcccttgcccgcgcgcccgcgtccccattctgcagcgatggccccgccctggccgtcgccctcttcagccgtttgtcccgaggcgccggacgacgggtggcacagccaaatgtcttcacctatggagtcctaatggactgctgctgccgtgcgcgccgcttggatgtagcgatcgccttcttcgcccatctcctcaagacgggactggaggcaggccaagtcgttttcggcaccctcctcaagggactgtgccacgcaaagcactcagatgaggctttggacgtggtgcttcacaggatgcctgagctaggctgcacccccgacgtggtggcctataccacggtcatccacggcttcttgaaggaaggccaagtaggcaaggcatgcaatctattccatggaatggcgcagcagggcgttgcgcctgatgtggtgacatatagctcagttattgatgcgctgtgcaaggccagagcaatggacaaggcagagtatttccttcgtgaaatggttgataatggtgtcgtacctaataatgtgacatataatagcctcatccatggatattcctctttgggccatcagaaggaggctgttagggtgctgaaagaaatgacaagacagggtatcatacctgatgtttttacttgcaactcggtcatggcctccctttgcaagaacggaaaaagcaaagaagctgcaaaaatgtttgattcaatgtccatgaagggcctgaaacctaacaccgtttcatatgttattctccttcatgggtatgccactgaaggatgcctagttgacatgatcaatctcttcaattccatggcaacagactgtattctacctaactgtcatatattcaacatactgatttatgcatatgctaaatctgggaagctcgacaaggctatgcttatatttaaagaaatgcagaaacaaggagtgagtccagatgcagtcacatattcaaccgtaatacatgcattttgcaaaaagggtaggttggatgatgctgtgataaagtttaatcagatgattgatacaggagtacgaccggacgcatctgtttatcgttccctaatccagggtttttgtacacatggcgatttggtgaaagcaaaggaatatgttactgaaatgatgaagaaaggtatgcttcctcctgatattatgttcttcagttcaatcatgcagaacctatgcacagaaggaagggtaatagaagcacgagatatccttgacttgatagtgtgcattggtatgaggcctgatgttttcatatttaatatactgatcggcggatactgcctagtccgcaagatggcagatgcatcaaaaatatttgatgatatggtgtcatatggtttagaaccttgtaatattacgtatggtatacttattaatggctattgcaaaaacggaaggattgatgacgggcttattctgttcaaggagatgctgcacaagggacttaaacctacaacttttaattataacgtcatactggatggattatttctggctagacaaactgttgctgcaaaggtgaagtttcatgagatggctgaatctggagtaagtgtgtgcattgatacatactctatagttcttggtggactttgtagaaataattgcatcggtgaagcaatcacgctatttcagaaattaagtacaatgaatgttaaattcaatattgcaattgtcaatatcatgattggtgcattcttcagggttcggcgaaaccaggaagctaaggatttgtttgctgcagtatcagccaatggtttggtagctaatgtctttacctacactgtaatgatgataaatcttatagaagaagggtcactggaagaagctgacactctctttttatcaatgaagaagagcggctgtactgccaactcttgtatgttaaatcatattatcagaaggttactggaaagaggagagatagtcaaggctggaaattatatgtcgaaagttgatgcaaagagctactcacttgaagctaaaactgttttgctgctgatctctctcttttcagggaatgggaaatatagagaacacataaaattgctccctatgaagtatcagtttctcgaagaagcagccacagttgaa

SEQ ID NO: 1876 - DNA, 543 bp, Triticum aestivum
atgccgaccggccggctgtcctccatcttcaccagcaatgcaacctcctccttcagggctccttcgccacagccacgagcccccctcgccgccttggctgccaccacagagcgcgtgtgtgccggaacgctaagaccggaggaggcgcaccacctgttcgacgaattgctgagccaagccgccgccgtcccggaacgcgggctgaacaactttcttgccgcactagcccgtgctccaccctcagctgcctgcagcgatggccccggccttgccatcaccctcttcaaccgcatgtcccgaggcgctggtgcacaggtggtgtcgcccacgctctgtacctattccattctcatggactgctgctgccgtgcaggccgcccggacttggtggttgccttctttggccgcctcctcagatcatctccttcaacaacctcctcaaggggctctgccaggtcaagcgtacaaatgaggctgtggacttgttgctccaccggacacctgaactggactgtgtgcctaatgtcttctcgtacagcatcg

SEQ ID NO: 1877 - DNA, 1095 bp, Triticum aestivum
atgccgaccggccggctgtcctccatcttcaccagcaatgcaacctcctccttcagggctccttcgccacagccacgagcccccctcgccgccttggctgccaccacagagcgcgtgtgtgccggaacgctaagaccggaggaggcgcaccacctgttcgacgaattgctgagccaagccgccgccgtcccggaacgggggctgaacaactttcttgccgcactagcccgtgctccaccctcagctgcctgcagcgatggccccggccttgccatcaccctcttcaaccgcatgtcccgaggcgctggtgcacaggtggtgtcgcccacgctctgtacctattccattctcatggactgctgctgccgtgcaggccgcccggacttggtggttgccttctttggccgcctcctcagattggggctgcacttgaatgtcatctccttcaacaacctcctcaaggggctctgccaggtcaagcgtacaaatgaggctgtggacttgttgctccaccggacacctgaactggactgtgtgcctaatgtcttctcgtacagcatcgtaatcaacggctgttttaaagaaggtgaagtagacaaagcgtgcaatctcttccatgagatgccccaactgggagttcaacctaatgtggtcatctacacctcaattatcgatgcactaagcaagtgcggagccatggacaaggcagaagtggtccttcagcaaatggttgatcaaggcattgaacccaacatcaggacatatactagcctgatacatggatattccgcttcgggtcagtggaaggcggcagctagagtattcaaggaaatggtaagtgctggtgttctaccaaatgctgtcactttgaactcatttatggattcactttgcaagcatagaaggacaaaggaaaagggcaacctggtgcatgtagctcccacttgcgcagggtccagggaagggtccgaccactttgggtctatagtacgcagcctttccctacatttctgtaagaggctgtttccaggacttgaacccatgacctcatggtcacaaggcagcagctttaccactgcgccaaggctcccctca

SEQ ID NO: 1878 - DNA, 816 bp, Triticum aestivum
atggatattgagcttgttggcaaggtggaggaagcactgagagtacttgatgctatgaagtctgctggcctccaacctactgctgttacgtatgctatacttcttaatggctactgtaaaattggcaggatcgccgatggattgagtcttttcagggaaatgtcactcagcggggttaaacccacgacttttatgtacaacattatacttgatgggctgtttcgctccgggagagcagtttctgcaaaggaaaaattccgtacgatgagcgaaagtggcataccagtgggcattgtcacatacaacatagttcttcatggattttgtagaaacaattgcactgatgaagcaatagagctgttcaagaaactacgtggaatgaatgtgaagattgatgtcataacactcactaccatgatttctgcaatgtttaaaactaggagaattgaagaagccaaggatttgtttgctactatatcagccattgggttggtgccttctgttgtgacttacagtgtaatgatgacgaatttcataaaagaagggttgctggcagaggctgatgatatgtttttagcaatggagaaggctggctgtgctcctgactcgagactgctaaatcacgtggtcagagtgttgctggagaatggtgcagttgtaaaggctgcaacttatctcgctaaacttgatgcaaaacagctgtcacttgaagcttcgacggtttcgttaatactatctctcttctcaaggaaagggaaattaagggagcatgtaaaattgcttccggtaaagtaccagcctcctgagatgttggac

SEQ ID NO: 1879 - DNA, 543 bp, Triticum aestivum; identical to SEQ ID NO: 1876

SEQ ID NO: 1880 - DNA, 1521 bp, Triticum aestivum
atgccgaccggccggctgtcctccatcttcaccagcaatgcaacctcctccttcagggctccttcgccacagccacgagcccccctcgccgccttggctgccaccacagagcgcgtgtgtgccggaacgctaagaccggaggaggcgcaccacctgttcgacgaattgctgagccaagccgccgccgtcccggaacgcgggctgaacaactttcttgccgcactagcccgtgctccaccctcagctgcctgcagcgatggccccggccttgccatcaccctcttcaaccgcatgtcccgaggcgctggtgcacaggtggtgtcgcccacgctctgtacctattccattctcatggactgctgctgccgtgcaggccgcccggacttggtggttgccttctttggccgcctcctcagattggggctgcgcttgaatgtcatctccttcaataacctcctcaaggggctctgccaggtcaagcgtacaaatgaggctgtggacttgttgctccaccggacacctgaactggactgtgtgcctaatgtcttctcgtacagcatcgtaatcaacggctgttttaaagaaggtgaagtagacaaagcgtgcaatctcttccatgagatgccccaactgggagttcaacctaatgtggtcatctacacctcaattatcgatgcactaagcaagtgcggagccatggacaaggcagaagtggtccttcagcaaatggttgatcaaggcattgaacccaacatcaggacatatactagcctgatacatggatattccgcttcgggtcagtggaaggcggcagctagagtattcaaggaaatggtaagtgttggtgttctaccaaatgctgtcactttgaactcatttatggattcactttgcaagcatagaaggacaaaggatgctagagatatttttgactccatggctgcaaagggccaaaaacctgacattttctcctactctattatgctaaatgggtatgctaaagaaggatacttcgaggatatgactgatctcttcaatttgatggtactgaatggtattgtacctaaccaccatattttcaacatactgatcaatgcatatgctaaacgtggactgatggatgaggctatgcacatgttcgaagtaatgaggcaacaaggagtaaacccaaatgtagttgactatgtagtagtaatggattcactttgcaaaatgggtaggatggatgctgctctggacaaatttactcagctggtcaatcaaggagtttcacctaacaaagctgtttaccaatgcctggttctgggttcttgctctcatggtcattttgtgaaagccaaggaattgatctctgaagcaattaatagaggtctgttttctaacagtgtgttcttctatcctgtaataaacgacctatgcaaagaaggaaaggtgaaggaggcacaggatatgtttgacttcattctaggtattggtcggcggcctgatgtgattatgtacaattcactgatggatggatat

SEQ ID NO: 1881 - DNA, 2328 bp, Triticum aestivum
atgccgaccggccggctgtcctccatcttcaccagcaatgcaacctcctccttcagggctccttcgccacagccacgagcccccctcgccgccttggctgccaccacagagcgcgtgtgtgccggaacgctaagaccggaggaggcgcaccacctgttcgacgaattgctgagccaagccgccgccgtcccggaacgcgggctgaacaactttcttgccgcactagcccgtgctccaccctcagctgcctgcagcgatggccccggccttgccatcaccctcttcaaccgcatgtcccgaggcgctggtgcacaggtggtgtcgcccacgctctgtacctattccattctcatggactgctgctgccgtgcaggccgcccggacttggtggttgccttctttggccgcctcctcagattggggctgcgcttgaatgtcatctccttcaacaacctcctcaaggggctctgccaggtcaagcgtacaaatgaggctgtggacttgttgctccaccggacacctgaactggactgtgtgcctaatgtcttctcgtacagcatcgtaatcaacggctgttttaaagaaggtgaagtagacaaagcgtgcaatctcttccatgagatgccccaactgggagttcaacctaatgtggtcatctacacctcaattatcgatgcactaagcaagtgcgtagccatggacaaggcagaagtggtccttcagcaaatggttgatcaaggcattgaacccaacatcaggacatatactagcctgatacatggatattccgcttcgggtcagtggaaggcggcagctagagtattcaaggaaatggtaagtgttggtgttctaccaaatgctgtcactttgaactcatttatggattcactttgcaagcatagaaggacaaaggatgctagagatatttttgactccatggctgcaaagggccaaaaacctgatattttctcctactctattatgctaaatgggtatgctaaagaaggatacttcgaggatatgactgatctcttcaatttgatggtactgaatggtattgtacctaaccaccatattttcaacatactgatcaatgcatatgctaaacgtggactgatggatgaggctatgcacatgttcgaagtaatgaggcaacaaggagtaaacccaaatgtagttgactatgtagtagtaatggattcactttgcaaaatgggtaggatggatgctgctctggacaaatttactcagatggtcaatcaaggagtttcacctaacaaagctgtctaccaatgcctggttctgggttcttgctctcatggtcattttgtgaaagccaaggaattgatctctgaagcaattaatagaggtctgttttctaacagtgtgttcttctatcctgtaataaacgacctatgcaaagaaggaaaggtgaaggaggcacaggatatgtttgacttcattctaggtattggtcggcggcctgatatgattatgtacaattcactgatggatggatattgccttgttggcaaggtggaggaagcactgagagtacttgatgctatgaagtctgctggcctccaacctactgctgttacgtatgctatacttcttaatggctactgtaaaattggcaggatcgccgatggattgagtcttttcagggaaatgtcactcagcggggttaaacccacgacttttatgtacaacattatacttgatgggctgtttcgctccgggagagcagtttctgcaaaggaaaaattccgtacgatgagcgaaagtggcataccagtgggcattgtcacatacaacatagttcttcatggattttgtagaaacaattgcactgatgaagcaatagagctgttcaagaaactacgtggaatgaatgtgaagattgatgtcataacactcactaccatgatttctgcaatgtttaaaactaggagaattgaagaagccaaggatttgtttgctactatatcagccattgggttggtgccttctgttgtgacttacagtgtaatgatgacgaatttcataaaagaagggttgctggcagaggctgatgatatgtttttagcaatggagaaggctggctgtgctcctgactcgagattgctaaatcatgtggtcagagtgttgctggagaatggtgcagttgtaaaggctgcaacttatctcgctaaacttgatgcaaaacagctgtcacttgaagcttcgacggtttcgttaatactatctctcttctcaaggaaagggaaattaagggagcatgtaaaattgcttccggtaaagtaccaacctcctgagatgttggac

SEQ ID NO: 1882 - DNA, 1521 bp, Triticum aestivum
atgccgaccggccggctgtcctccatcttcaccagcaatgcaacctcctccttcagggctccttcgccacagccacgagcccccctcgccgccttggctgccaccacagagcgcgtgtgtgccggaacgctaagaccggaggaggcgcaccacctgttcgacgaattgctgagccaagccgccgccgtcccggaacgcgggctgaacaactttcttgccgcactagcccgtgctccaccctcagctgcctgcagcgatggccccggccttgccatcaccctcttcaaccgcatgtcccgaggcgctggtgcacaggtggtgtcgcccacgctctgtacctattccattctcatggactgctgctgccgtgcaggccgcccggacttggtggttgccttctttggccgcctcctcagattggggctgcgcttgaatgtcatctccttcaacaacctcctcaaggggctctgccaggtcaagcgtacaaatgaggctgtggacttgttgctccaccggacacctgaactggactgtgtgcctaatgtcttctcgtacagcatcgtaatcaacggctgttttaaagaaggtgaagtagacaaagcgtgcaatctcttccatgagatgccccaactgggagttcaacctaatgtggtcatctacacctcaattatcgatgcactaagcaagtgcggagccatggacaaggcagaagtggtccttcagcaaatggttgatcaaggcattgaacccaacatcaggacatatactagcctgatacatggatattccgcttcgggtcagtggaaggcggcagctagagtattcaaggaaatggtaagtgttggtgttctaccaaatgctgtcactttgaactcatttatggattcactttgcaagcatagaaggacaaaggatgctagagatatttttgactccatggctgcaaagggccaaaaacctgacattttctcctactctattatgctaaatgggtatgctaaagaaggatacttcgaggatatgactgatctcttcaatttgatggtactgaatggtattgtacctaaccaccatattttcaacatactgatcaatgcatatgctaaacgtggactgatggatgaggctatgcacatgttcgaagtaatgaggcaacaaggagtaaacccaaatgtagttgactatgtagtagtaatggattcactttgcaaaatgggtaggatggatgctgctctggacaaatttactcagatggtcaatcaaggagtttcacctaacaaagctgtttaccaatgcctggttctgggttcttgctctcatggtcattttgtgaaagccaaggaattgatctctgaagcaattaatagaggtctgttttctaacagtgtgttcttctatcctgtaataaacgacctatgcaaagaaggaaaggtgaaggaggcacaggatatgtttgacttcattctaggtattggtcggcggcctgatgtgattatgtacaattcactgatggatggatat

SEQ ID NO: 1883 - DNA, 816 bp, Triticum aestivum
atggatattgagcttgttggcaaggtggaggaagcactgagagtacttgatgctatgaagtctgctggcctccaacctactgctgttacgtatgctatacttcttaatggctactgtaaaattggcaggatcgccgatggattgagtcttttcagggaaatgtcactcagcggggttaaacccacgacttttatgtacaacattatacttgatgggctgtttcgctccgggagagcagtttctgcaaaggaaaaattccgtacgatgagcgaaagtggcataccagtgggcattgtcacatacaacatagttcttcatggattttgtagaaacaattgcactgatgaagcaatagagctgttcaagaaactacgtggaatgaatgtgaagattgatgtcataacactcactaccatgatttctgcaatgtttaaaactaggagaattgaagaagccaaggatttgtttgctactatatcagccattgggttggtgccttctgttgtgacttacagtgtaatgatgacgaatttcataaaagaagggttgctggcagaggctgatgatatgtttttagcaatggagaaggctggctgtgctcctgactcgagactgctaaatcacgtggtcagagtgttgctggagaatggtgcagttgtaaaggctgcaacttatctcgctaaacttgatgcaaaacagctgtcacttgaagcttcgacggtttcgttaatactatctctcttctcaaggaaagggaaattaagggagcatgtaaaattgcttccggtaaagtaccagcctcctaagatgttggac

SEQ ID NO: 1884 - DNA, 1521 bp, Triticum aestivum; identical to SEQ ID NO: 1880

SEQ ID NO: 1885 - DNA, 816 bp, Triticum aestivum
atggatattgagcttgttggcaaggtggaggaagcactgagagtacttgatgctatgaagtctgctggcctccaacctactgctgttacgtatgctatacttcttaatggctactgtaaaattggcaggatcgccgatggattgagtcttttcagggaaatgtcactcagcggggttaaacccacgacttttatgtacaacattatacttgatgggctgtttcgctccgggagagcagtttctgcaaaggaaaaattccgtacgatgagcgaaagtggcataccagtgggcattgtcacatacaacatagttcttcatggattttgtagaaacaattgcactgatgaagcaatagagctgttcaagaaactacgtggaatgaatgtgaagattgatgtcataacactcactaccatgatttctgcaatgtttaaaactaggagaattgaagaagccaaggatttgtttgctactatatcagccattgggttgttgccttctgttgtgacttacagtgtaatgatgacgaatttcataaaagaagggttgctggcagaggctgatgatatgtttttagcaatggagaaggctggctgtgctcctgactcgagactgctaaatcacgtggtcagagtgttgctggagaatggtgcagttgtaaaggctgcaacttatctcgctaaacttgatgcaaaacagctgtcacttgaagcttcgacggtttcgttaatactatctctcttctcaaggaaagggaaattaagggagcatgtaaaattgcttccggtaaagtaccagcctcctgagatgttggac

SEQ ID NO: 1886 - DNA, 816 bp, Triticum aestivum; identical to SEQ ID NO: 1878

SEQ ID NO: 1887 - DNA, 2313 bp, Triticum aestivum
atgccagccgcccgcctgtcctccatctccacctcctccttcagggctccttcacgagcccccctggccgccttggctgccgccacggagcgtgtgcgcgcgggaacgctgagccaggaggacgcgcaccacctgttcgacgaattgcttggccaagctgccgccgtcccggaacgcgggctcaacaactttcttgccgcactcgctcgtgctccaccctcagctgcctgccgcgatggcccgggccttgccatcgccctcttcaaccacatgtcccgaggcgctggtgcacgggtggtgtcgcccacactatgtacctattccatcctcatggactgctgctgccgcgcaggccgcccggacttggtggttgccttcttcggtcgcctcattaggttggggctgcgcttggaggtcatctccttcagcaatctcctcaaggggctctgccaggccaagcgtacaaatgaggcggtggacttgctgctccaccggacacctgaactggactgtgtgcctaatgtcttctcgtacaacatcgtaatcagcagctgttttaaagaaggtgaagtagacaaagcgtgcaatctcttccatgagatgccccaactgggagttcaacctaatgtggtcatctacacctcaattatcgatgcactaagcaagtgcggagccatggacaaggcagaagtggtccttcagcaaatggttgatcaaggcattgaacccgacatcaggacatatactagcctgatacatggatattctgcttcgggtcagtggaaggcggcagttagagtattcaaggaaatggtaagtgttggtgttctaccaaatgctgtcactttgaactcatttatggattcactttgcaagcatagaaggacaaaggaagctagagaaatttttgactctatggctgcaaagggcctgaaacctaatatcgtctcctactctactatgcttaatgggtatgtcaaagaaggatccttcgaggatatgactgatctcttcaattcgatggtacggaatggtattgtacctaaccaccatattttcaacatactgatcaatgcatatgctaaacgtggactgatggatgaggctatgcacatgttcgaagtaatgaggcaacaaggagtaaacccggatgtatttgactatcaaatcataatggattcactttgcaaaatgggtaggatggatgctgctctggacaaatttaatcagatggtcaatcaaggagtttcacctaacaaagctgtttaccaatgcctggttctgggttcttgctctcatggtgattttgtgaaagccaaggaattgatttctgaagcagttaatagaggtctgtgttctaacagtgtgttcttctatcctgtaataaacgacctttgcaaagaaggaaaggtaaaggaggcccaggatatgtttgacttcatcctaggtattggtcagcggcctgatgtgattatgtacacttcactgatggatggatattgccttgttggcaaggtggagaaagcactgagtgtactcgatgctatgaaatctgctggcctccaacctgatgatgttgtatatgctacacttcttaacggttactgtaaaattggaaggattgccgatggattgagccttttcagggaaatgtcactcagcggggttaagcccacgactattatatacaacattatactggatgggctgttttgctctgggagaacaggttctgcaaaggaaaaattccatacgatgactgaaagtggcataccagtaggcgttgacacatacaacatagttcttagtggactttgtagaaacaattgcactgatgaagcaatagaactgttcaagaaactacgtgcaacgaacgtgaagattgatatcatgacactcaatatcatgatttctgcaatgtttaaaactaggagaattgaagaagccaaggatttgtttgctactatatcagccatcggattggtgccttctgttgtgacttacagtttaatgatgacgaatttcataaaagaagggttgttggcagatgctgatgatacctttttggtaatggagaaagctggctgtgctcccaactccagtctgctaaatcaggtggtcagggtgttgctggaaaaaggtgcatttgtaaaggctgcaacttatctcgctaaacttgatgctaaacagctgtcagttgaagcttcaacgatttcgttaatagtatctctcttctcaggggaagggaaaccaagggagcatgtagagttgcttccagtaaagtaccagcctcctcagagttcggctgacaat

SEQ ID NO: 1888 - DNA, 2313 bp, Triticum aestivum
atgccggccgcccgcctgtcctccatccccacctcctccttcagggcttcttcacgagcccccctcgccgccttggctgtcgccacggaacgcgttcgcgctggaacgctaagccgggaggacgcgcaccacctgttcgacgaattgcttggccaagccgccgctgtcccggaacgcgggctcaacaactttcttgccgcactcgcccgtgctccaccctcagctgcctgccgcgatggccccggccttgccatcgccctcttcaaccgcatgtcccgaggcactggtgcacgggtggtgtcgcccacgctctgtacctattccatcctcatggactgctgctgccgtgcaggccgcccggacttggtggttgccttcttcggccgcctcctcaggttggggctgcgcttggacgtcatctccttaagcaatctcctcaaggggctttgccaggctaagcgctcaaatgaggcattggatctgctgctccaccggatgcccgaactacactgtgcgcctggtgtcttctcgtacaacatagtaatcaacggctgcttgaaagaaggtgaagtagacaaagcgtgcaatctcttccatgagatgccccaactgggagttcaacctgatgtggtgacctacacctcaatcatggacgcactaagcaagtctggagcaatggacaaggcagaagtgctccttcggcaaatggttgatcaaggaattgaacccaatattaggacatatagctgtctgatccatggatattctacttttggtcagtggaaggaggcacttagggtattcaaagaaatggcaactcttggtgttgtaccagacgttgtcacgttgagctcattaatcgattccctttgcaagcacagaaggacaaaggaagctagagaaatttttgactctatggctgcaaagggcctgaaacctaatatcgtctcctactctactatgcttaatgggtatgtcaaagaaggatccttcgaggatatgactgatctcttcaattcaatggtacggaatggtattgtacctgaccaccatattttcaacatacagatcaatgcatatgctaaacgtggactgatggatgaggctatgcacatgttcgaagtaatgaggcaacaaggagtaaacccggatgtatttgactatcaaatcataatggattcactttgtaaaatgggtaggatggatgctgctctggacaaatttaatcagatggtcaatcaaggagtttcacctaacaaagctgtttaccaatgcctggttctgggttcttgctctcatggtgattttgtgaaagccaaggaattgatttctgaagcggttaatagaggtctgtgttctaacagtgtgttcttctatcctgtaataaacgacctttgcaaagaaggaaaggtaaaggaggcacaggatatgtttgacttcatcctaggtattggtcagcggcctgatgtgattatgtacacttcactgatggatggatattgccttgttggcaaggtggagaaagcactgagtgtactcgatgctatgaaatttgctggccttcaacctgatgatgttgtatatggtacacttcttaacagttactgtaaaattggaaggattgccgatggattgagccttttcagggaaatgtcactcagcggggttaagcccacgactattatatacaacattatactggatgggctgttttgctctgggagaacaggttctgcaaaggaaaaattccatacgatgactgaaagtggcataccagtaggcgttgacacatacaacatagttcttagtggactttgtagaaacaattgcactgatgaagcaatagaactgttcaagaaactacgtgcaacgaacgtgaagattgatgtcatgacactcaatatcatgatttctgcaatgtttaaaactaggagaattgaagaagccaaggatttgtttgctactatatcagccattggattggtgccttctgttgtgacttacagtttaatgatgacgaatttcataaaagaagggttgttggcagacgctgatgatacctttttggtaatggagaaagctggctgtgctcccaactccagtctgctaaatcaggtggtcagggtgttgctggaaaaaggtgcagttttaaaggctgcaacttatctcgctaaacttgatgctaaacagctgtcagttgaagtttcaacgatttcgttaatagtatctctcttctcaggggaagggaaactaagggagcatgtagagttgcttccagtaaagtaccagcctcctcagagttcggctgacaat

SEQ ID NO: 1889 - DNA, 2043 bp, Triticum aestivum
atgtcccgaggcgctggtgcacgggtggtgtcgcccacgctctgtacctattccatcctcatggactgctgctgccgtgcaggccgcccggacttggtgcttgccttcttcggccgcctcctcaggttggggctgcgcttggacgtcatctccttaagcaatctcctcaaggggctttgccaggctaagcgctcaaatgaggcattggatctgctgctccaccggatgcccgaactacactgtgcgcctgatgtcttctcgtacaacatagtaatcaacggctgcttgaaagaaggtgaagtagacaaagcgtgcaatctcttccatgagatgccccaactgggagttcaacctgatgtggtgacctacacctcaatcatggacgcactaagcaagtccggagcaatggacaaggcagaagtgctccttcggcaaatggttgatcaaggaattgaacccaatatcaggacatatagctgtctgatccatggatattctacttttggtcagtggaaggaggcacttagggtattcaaagaaatggcaagtcttggtgttgtaccagacgttgtcacgttgagctcattaatcgattccctttgcaggcacagaaggacaaagcaagctagagaaatttttgactctatggctgcaaagggcctgaaacctaatatcgtctcctactctactatgcttaaagggtatgtcaaagaaggatccttcgaggatatgactgatctcttcaattcgatggtacggaatggtattgtacctgaccaccatattttcaacatacagatcaatgcatatgctaaacgtggactgatggatgaggctatgcacatgttcgaagtaatgaggcaacaaggagtaaacccggatgtatttgactatcaaatcataatggattcactttgtaaaatgggtaggatggatgctgctctggacaaatttaatcagatggtcaatcaaggagtttcacctaacaaagctgtttaccaatgcctggttctgggttcttgctctcatggtgattttgtgaaagccaaggaattgatttctgaagcggttaatagaggtctgtgttctaacagtgtgttcttctatcctgtaataaacgacctttgcaaagaaggaaaggtaaaggaggcacaggatatgtttgacttcatcctaggtattggtcagcggcctgatgtgattatgtacacttcactgatggatggatattgccttgttggcaaggtggagaaagcactgagtgtactcgatgctatgaaatttgctggccttcaacctgatgatgttgtatatggtacacttcttaacggttactgtaaaattggaaggattgccgatggattgagccttttcagggaaatgtcactcagcggggttaagcccacgactattatatacaacattatactggatgggctgttttgctctgggagaacaggttctgcaaaggaaaaattccatacgatgactgaaagtggcataccagtaggcgttgacacatacaacatagttcttagtggactttgtagaaacaattgcactgatgaagcaatagaactgttcaagaaactatgtgcaacgaacgtgaagattgatgtcatgacactcaatatcatgatttctgcaatgtttaaaactaggagaattgaagaagccaaggatttgtttgctactatatcagccatcggattggtgccttctgttgtgacttacagtttaatgatgacgaatttcataaaagaagggttgttggcagacgctgatgatacctttttggtaatggagaaagctggctgtgctcccaactccagtctgctaaatcaggtggtcagggtgttgctggaaaaaggtgcagttttaaaggctgcaacttatctcgctaaacttgatgctaaacagctgtcagttgaagtttcaacgatttcgttaatagtatctctcttctcaggggaagggaaactaagggagcatgtagagttgcttccagtaaagtaccagcctcctcagagttcggctgacaat

SEQ ID NO: 1890 - DNA, 2043 bp, Triticum aestivum; identical to SEQ ID NO: 1889

SEQ ID NO: 1891 - DNA, 2313 bp, Triticum aestivum; identical to SEQ ID NO: 1888

SEQ ID NO: 1892 - DNA, 1557 bp, Triticum aestivum
  misc_feature (1048)..(1048): n is a, c, g, or t
  misc_feature (1549)..(1549): n is a, c, g, or t
atgccccaactgggagttcaacctgatgtggtgacctacacctcaatcatggacgcactaagcaagtccggagcaatggacaaggcagaagtgctccttcggcaaatggttgatcaaggaattgaacccaatatcaggacatatagctgtctgatccatggatattctacttttggtcagtggaaggaggcacttagggtattcaaagaaatggcaagtcttggtgttgtaccagacgttgtcacgttgagctcattaatcgattccctttgcaggcacagaaggacaaagcaagctagagaaatttttgactctatggctgcaaagggcctgaaacctaatatcgtctcctactctactatgcttaaagggtatgtcaaagaaggatccttcgaggatatgactgatctcttcaattcgatggtacggaatggtattgtacctgaccaccatattttcaacatacagatcaatgcatatgctaaacgtggactgatggatgaggctatgcacatgttcgaagtaatgaggcaacaaggagtaaacccagatgtatttggctatcaaatcataatggattcactttgtaaaatgggtaagatggatgctgctctggacaaatttaatcagatggtcaatcaaggagtttcacctaacaaagctgtttaccaatgcctggttctgggttcttgctctcatggtgattttgtgaaagccaaggaattgatttctgaagcggttaatagaggtatgtgttctaacagtgtgttcttctatcctgtaataaacgacctttgcaaagaaggaaaggtaaaggaggcacaggatatgtttgacttcatcctaggtattggtcagcggcctgatgtgattatgtacacttcactgatggatggatattgccttgttggcaaggtggagaaagcactgagtgtactcgatgctatgaaatttgctggccttcaacctgatgatgttgtatatggtacacttcttaacagttactgtaaaattggaaggattgccgatggattgagccttttcaggnaaatgtcactcagcggggttaagcccacgactattatatacaacattatactggatgggctgttttgctctgggagaacaggttctgcaaaggaaaaattccatacratgactgaaagtggcataccagtaggcgttgacacatacaacatagttcttagtggactttgtagaaacaattgcactgatgaagcaatagaactgttcaagaaactacgtgcaacgaacgtgaagattgatgtcatgacactcaatatcatgatttctgcaatgtttaaaactaggagaattgaagaagccaaggatttgtttgctactatatcagccatcggattggtgccttctgttgtgacttacagtttaatgatgacgaatttcataaaagaagggttgttggcagacgctgatgatacctttttggtaatggagaaagctggctgtgctcccaactccagtctgctaaatcargtggtcagggygttgctggaaaaaggtgcagttntaaatgaa

SEQ ID NO: 1893 - DNA, 2043 bp, Triticum aestivum; identical to SEQ ID NO: 1889

SEQ ID NO: 1894 - DNA, 2313 bp, Triticum aestivum
atgccggccgcccgcctgtcctccatccccacctcctccttcagggcttcttcacgagcccccctagccgccttggctgtcgccacggaacgcgttcgcgctggaacgctaagccgggaggacgcgcaccacctgttcgacgaattgcttggccaagccgccgctgtcccggaacgcgggctcaacaactttcttgccgcactcgcccgtgctccaccctcagctgcctgccgcgatggccccggccttgccatcgccctcttcaaccgcatgtcccgaggcactggtgcacgggtggtgtcgcccacgctctgtacctattccatcctcatggactgctgctgccgtgcaggccgcccggacttggtgcttgccttcttcggccgcctcctcaggttggggctgcgcttggacgtcatctccttaagcaatctcctcaaggggctttgccaggctaagcgctcaaatgaggcattggatctgctgctccaccggatgcccgaactacactgtgcgcctggtgtcttctcgtacaacatagtaatcaacggctgcttgaaagaaggtgaagtagacaaagcgtgcaatctcttccatgagatgccccaactgggagttcaacctgatgtggtgacctacacctcaatcatggacgcactaagcaagtccggagcaatggacaaggcagaagtgctccttcggcaaatggttgatcaaggaattgaacccaatatcaggacatatagctgtctgatccatggatattctacttttggtcagtggaaggaggcacttagggtattcaaagaaatggcaactcttggtgttgtaccagacgttgtcacattgagctcattaatcgattccctttgcaagcacagaaggacaaaggaagctagagaaatttttgactctatggctgcaaagggcctgaaacctaatatcgtctcctactctactatgcttaatgggtatgtcaaagaaggatccttcgaggatatgactgatctcttcaattcgatggtacggaatggtattgtacctgaccaccatattttcaacatacagatcaatgcatatgctaaacgtggactgatggatgaggctatgcacatgttcgaagtaatgaggcaacaaggagtaaacccggatgtatttgactatcaaatcataatggattcactttgtaaaatgggtaggatggatgctgctctggacaaatttaatcagatggtcaatcaaggagtttcacctaacaaagctgtttaccaatgcctggttctgggttcttgctctcatggtgattttgtgaaagccaaggaattgatttctgaagcggttaatagaggtctgtgttctaacagtgtgttcttctatcctgtaataaacgacctttgcaaagaaggaaaggtaaaggaggcacaggatatgtttgacttcatcctaggtattggtcagcggcctgatgtgattatgtacacttcactgatggatggatattgccttgttggcaaggtggagaaagcactgagtgtactcgatgctatgaaatttgctggccttcaacctgatgatgttgtatatggtacacttcttaacagttactgtaaaattggaaggattgccgatggattgagccttttcagggaaatgtcactcagcggggttaagcccacgactattatatacaacattatactggatgggctgttttgctctgggagaacaggttctgcaaaggaaaaattccatacaatgactgaaagtggcataccagtaggcgttgacacatacaacatagttcttagtggactttgtagaaacaattgcactgatgaagcaatagaactgttcaagaaactacgtgcaacgaacgtgaagattgatgtcatgacactcaatatcatgatttctgcaatgtttaaaactaggagaattgaagaagccaaggatttgtttgctactatatcagccatcggattggtgccttctgttgtgacttacagtttaatgatgacgaatttcataaaagaagggttgttggcagacgctgatgatacctttttggtaatggagaaagctggctgtgctcccaactccagtctgctaaatcaggtggtcagggtgttgctggaaaaaggtgcagttttaaaggctgcaacttatctcgctaaacttgatgctaaacagctgtcagttgaagtttcaacgatttcgttaatagtatctctcttctcaggggaagggaaactaagggagcatgtagagttgcttccagtaaagtaccagcctcctcagagttcggctgacaat

SEQ ID NO: 1895 - DNA, 2361 bp, Triticum aestivum
atgcctcgcttctcctccagcacgccaatgtcgccaccccgcctccgcctccgactctgcgcccgccactcctcctccacctctcatccctcacgcatctgggatccccacgccgccttcgccgccgcgacgcagcgggcgcactctggcaacctcaccccggaggacgcacaccatctgttcgacgaattgctgcggcagggcaatcctgtccaggagcgtcccttgaataactttctggctaccctcgcccgcgcgcccgcgtctgcatcctgcagtgatggccccgccctggccgttgccctctttggccgtttgtccggaggcgccggacgacgggtggcgcagccaaatgtgttcacctatggcgtcctcatggactgctgctgccgcgcgtgccgcacggatctggcgctcgctttcttcggccgtctcttcaggacgggcctggaggcaaaccaagtcatcttctgcaccctcctcaagggactctgccacgcaaagcgcacagatgaggctctggacgtgctgcttcacaggatgcctgagctgggctgcactccctatgtggtggcatataacaccgtcatccatggcttctttagggaaggccaagtaggcaaggcgtgcgatctgttccatggaatggcgcagcagggcgttatgcctgatgtggtgacatataactcagttatcgatgcgttgtgcaaggccagagcaatggacaaggcagagtatttccttcgtcagatggttgataatggtgtcgtacctaatactgtcacatataatagcctcatccatggatattcctcttcaggccattggaaggaggcggtcagggtattcaaagagatggcaagtcagagggttacagcagatgtgcatacttacaacatgtttatgacttttctttgcaaacatggaagaagcaaagaagctgcaggaatttttgataccatggctatcaagggcctgaaacctgataacgtttcatatgctattcgccttcatgggtatgccaccgaaggatgcttagttgatatgattaatctcttcaattcaatggaaagagattgtattctacctgactgtcgtatcttcaacatactgattaatgcatatgctaaatctgggaagcttgataaggctatgcttatcttcaatgaaatgcagaaacaaggagtgagtccaaatgcagtcacatattcaactgtaatagatgcattttgcaaaaagggtcagttggacgatgctatgataaagtttaatcagatgattgatacaggagtaccacagggcacagctgtttatggttctctaatccagggtttttgtacacacggcaatttggtgaaagcaaaggaattgcttactgaaatgatgaacaaaggtatacctcctcctgatattaagttcttccattcaatcatgcagaacctttgcacagaaggaagggtaatagaagcacatgatgtccttggcttgatagcgcacataggtatgaggcctaatgtttgcacatttaatatactgagcggtggatattgcctagtcggcaagatggaggatgcctcaaagatatttgatgatatgatgtcatatggcttagaaccttctaatatgacgtatggtatacttattaatggctattgcaaaaacgaaaggattaacgatgggttgattctgttcaaagaaatgttgcgcaagggacttaaacctacaacttttaattacaacgtcatactggatggattatttctaactggacgaactgttgctgcaaaggaaaagtttgatgagatggttgaatctggagtaagtgtgtgcattgatacatattcgatagttcttggtggactttgtagaaataattgtagcggcgaagcaatcatgctattccagaaattaagcacaatggatgtgaaattcaatattacaattgtcaatataatgattgatgccttctacagggttcagcgaaaccaagaagccaaggatttgtttgctgcagtatcagccaatggtttggtagctgatgtctttacctacaccataatgatgaaaaatcttataaaagaagggtcagtggaagaagctgacgatctctttttatcaatggagaagagcggctgtactgctgactcttatatgttaaatcttatcgtcagaatgttactggaaaaaggagagctagtcaaggctgggaattatatgtctaaagttgatgcaatgagctactcacttgaagctgaaaccgtttcgctgcttatctctctcttttcagggaaagggaaatatagagaacacataggattgctccctacaaagtatcggtttcatgaagaagcagccacagtt

SEQ ID NO: 1896 - DNA, 2361 bp, Triticum aestivum
atgcctcgcttctcctccagcacgccaatgtcgccaccccgcctccgcctccgactctgcgcccgccactcctcctccacctctcatccctcacgcatctgggatccccacgccgccttcgccgccgcgacgcagcgggcgcgctctggcaacctcaccccggaggacgcacaccatctgttcgacgaattgctgcggcagggcaatcgtgtccaggaacgtcccttgaataactttctggctaccctcgcccgcgcgcccgcgtctgcatcctgcagtgatggccccgccctggccgttgccctctttggccgtttgtccggaggcgccggacgacgggtggcgcagccaaatgtgttcacctatggcgtcctcatggactgctgctgctgcgcgtgccgcacggatctggcgctcgccttcttcggccgtctcctcaagacgggcctggaggcagaccaagtcgtcttctgcaccctcctcaagggcctttgccacgcaaagcgggcagatgaggctctggacgtgctgcttcacaggatgcctgagctgggctgcactccctatgtggtggcgtataacaccgtcatccatggcttctttagggaaggccaagtaggcaaggcgtgcaatctattccatgaaatgaggcagcagggcgttacacctgatgttgtgacatataacacagttattgatgcgttgtgcaaggccaaagcaatggacaaggcagagtatttccttggtcagatggttgatgatggtgtcgtacctgataatgtgacatataatagccttatccatggatattcctcttcaggccattcaaaggaggcggtcagggtgctgaaagagatgacaagtaagggtatcataccagatgtttttacttgcaactcgctcatggcctccctttgcaagaatggaagaagcaaagaagctgcagaaatatttgattcaatgtccatgaagggcctgaaacctaacaccgtttcatatgctattctccttcatgggtatgccattgaaggatgcttggttgacatgatcaatctcttcaattcaatggcaacagactgtattctacctaactgtcatatcttcagcatactgattaatgcatatgctaaatctgggaagcttgataaggctatgcttatcttccatgaaatgcagaaacaaggagtgagtccaaatgcagtcacatattcaactgtaatagatgcattttgcaaaaagggtcagttggacgatgctatgataaagtttaatcagatgattgatacaggagtacgacagggcacagctgtttatggttctctaatccagggtttttgtacacacggcgatttggtgaaagcaaaggaattgcttactgaaatgatgaacaaaggtatacctcctcctgatattaagttcttccattcaatcatgcagaaccttggcacagaaggaagggtaatagaagcacgggatgtccttggcttgatagcgcacataggtatgaggcctaatgtttgcacatttaatatactgatcggtggatattgcctagtcggcaagatggaggatgcctcaaaaatatttgatgatatgatgtcatatggcttagaaccttctaatattacgtatggtatacttattaatggctattgcaaaaacgaaaggattaacgatgggttgattctgttcaaagaaatgttgcgcaagggacttaaacctacaacttttaattacaacgtcatactggatggattatttctgactggacgaactgttgctgcaaaggaaaagtttgatgagatggttgaatctggagtaagtgtgtgcattgatacatattcgatagttcttggtggactttgtaaaaataattgtagcggcgaagcaatcacgctattccagaaattaagcacaatggatgtgaaattcaatattacaattgtcaatataatgattgatgccttctacagggttcagcgaaaccaagaagccaaggatttgtttgctgcagtatcagccaatggtttggtagctaatgtctttacctacaccataatgatgaaaaatcttataaaagaagggtcagtggaagaagctgacgatctctttttatcaatggagaagagcggctgtactgctgactcttatatgttaaatcttatcgtcagaatgttactggaaaaaggagagctagtcaaggctgggaattatatgtctaaagttgatgcaatgagctactcacttgaagctgaaaccgtttcgctgcttatctctctcttttcagggaaagggaaatatagagaacacataggattgctccctacaaagtatcggtttcatgaagaagcagccacagtt

SEQ ID NO: 1897 - DNA, 2337 bp, Triticum aestivum
atgtcgccaccccgtctccgcctccgactctgcgctcgccactcctcctccacctctcatccctcacgcatctgggatccccacgccgccttcgccgccgccacggaacgtgcgcactctggcaacctcacccccgaggacgcacaccacctgtttgacgaattgctgcggcaggccaatcctgtccaggagcgccccctcaacaaccttcttgccgccctcgcccgtgctccggcgtccgcggcgtgcagcgatggccctgcactcacagtcaatctcttcagccgcatatcccaaggcgcccgccgacgtgtggcgcacccaacggcctgcacctatggcatcctcatggactgctgctgccgcgcacaccgcctcgatctggcgttcgctttcttcggctgtctcctcaggacgggacttaaggcaggcgtcattcaagtttgcactcttctcaagggcctttgccgcgcaaagcgggctgatgaggctctggacatgctgcttcacaggatgcctgagctgggctgcacccccaacgtggtggcatataccacggtcatccacggcttctttaaggaaggccaagtaggcaaggcatgcaatctgttccatggaatggcgcagcagggcgttatgcctgatgtggtgacatataactcagttatcgatgcgctgtgcaaggccagagcaatggacaaggcagagtatttccttcgtcagatggttgataatggtgtcgtacctaataatgtcacatataatagcctcatccatggatattcctcttcaggccattggaaggaggcggtcagggtattcaaagagatgacaagtcggagggttacagcagatgtgcatacttacaacatgtttatgacctttctttgcaaacatggaagaagcaaagaagctgcaggtatttttgataccatggctatgaagggcctgaaacctgacaacgtttcatatgctattcgccttcatgggtatgccaccgaaggatgcttagttgatatgattaatctcttcaattcaatggaaagagactgtattctacctgactgttatatcttcaacatactgattaatgcatatgctaaatctgggaagcttgataaggctatgcttatcttcaatgaaatgcagaaacaaggagtgagtccaaatgcagtcacatattcaactgtaatagatgcattttgcaaaaagggtcagttggacgatgctatgataaagtttaatcagatgattgatacaggagtacgacagggcacagctgtttatcgttccctaatccagggattttgtacacacagcgatttggtgaaagcaaaggaattgcttactgaaatgatgaacaaaggtatacctcctcctgatattaagttcttccattcaatcatgcagaacctatgcacagaaggaagggtaatagaagcacgggatatccttggcttgatagcacacataggtatgaggcctaatgtttgcacatttaatatactgattggtggatactgcctagtcggcaagatggaggatgcctcaaaaatatttgatgatatgatgtcatatggtttagaaccttgtaacattacgtatggtatacttattaatggctattgcaaaaatagaaggattgatgacgggcttattctgttcaaagagatgctgcacaagggacttaaacctacaacctttaattataacgtcatactggatggattatttctggttggacgaactgttgctgcaaaggaaaagtttgacgagatggttgaatctggagtatgtgtgtgcattgatacatattcgatagttcttggtggactttgtagaaataattgtagcggcgaagcaatcacgctattccagaaattaagcacaatggaagtgaaattcaatattacaattgtcaatataatgattgatgctttctacaaggttcagcgaaaccaagaagccaaggatttgtttgctgcagtatcagccaatggtttggtagctgatgtctttacctacaccagaatgatgaaaaatcttataaaagaagggtcagtggaagaagctgacgatctctttttatcaatggagaagagcggctgtactgctgactcttatatgttaaatcttatcgtcagaatgtttctgggaaaaggagagatagtcaaggctgggaattatatatctaaaattgatgcaaagagctactcacttgaagctaaaactgtttcgctgcttatctctctcttttcagggaaagggaaatatagagaacacataggattgctccctgcaaagtatcggtttcgtgaagaagcagccacagttgtg

SEQ ID NO: 1898 - DNA, 2337 bp, Triticum aestivum
atgtcgccaccccgcctccgcctccgactctgcgcccgccactcctcctccacctctcatccctcacgcatctgggatccccacgccgccttcgccgccgccacggaacgtgcgcactctggcaacctcacccccgaggacgcacaccacctgtttgacgaattgctgcggcaggccaatcctgtccaggagcgccccctcaacaaccttcttgccgccctcgcccgtgctccggcgtccgcggcgtgcagcgatggccctgcactcacagtcaatctcttcagccgcatatcccaaggcgcccgccgacgtgtggcgcacccaacggcctgcacctatggcatcctcatggactgctgctgccgtgcacaccgcctcgatctggcgttcgctttcttcggctgtctcctcaggacgggacttaaggcaggcgtcattcaagtttgcactcttctcaagggcctttgccgcgcaaagcgggctgatgaggctctggacatgctgcttcacaggatgcctgagctgggctgcacccccaacgtggtggcatataccacggtcatccacggcttctttaaggaaggccaagtaggcaaggcatgcaatctgttccatggaatggcgcagcagggcgttatgcctgatgtggtgacatataactcagttatcgatgcgctgtgcaaggccagagcaatggacaaggcagagtatttccttcgtcagatggttgataatggtgtcgtacctaataatgtcacatataatagcctcatccatggatattcctcttcaggccattggaaggaggcggtcagggtattcaaagagatgacaagtcggagggttacagcagatgtgcatacttacaacatgtttatgacctttctttgcaaacatggaagaagcaaagaagctgcaggaatttttgataccatggctatgaagggcctgaaacctgacagcgtttcatatgctattcgccttcatggatatgccaccgaaggatgcttagttgatatgattaatctcttcaattcaatggaaagagattgtattctacctgactgtcgtatcttcaacatactgattaatgcatatgctaaatctgggaagcttgataaggctatgcttatcttcaatgaaatgcagaaacaaggagtgagtccaaatgcagtcacatattcaactgtaatagatgcattttgcaaaaagggtcagttggacgatgctatgataaagtttaatcagatgattgatacaggagtacgacagggcacagctgtttatcgttccctaatccagggattttgtacacacagcgatttggtgaaagcaaaggaattgcttactgaaatgatgaacaaaggtatacctcctcctgatattaagttcttccattcaatcatgcagaacctatgcacagaaggaagggtaatagaagcacgggatatccttggcttgatagcacacataggtatgaggcctaatgtttgcacatttaatatactgattggtggatactgcctagtcggcaagatggaggatgcctcaaaaatatttgatgatatgatgtcatatggtttagaaccttgtaacattacgtatggtatacttattaatggctattgcaaaaatagaaggattgatgacgggcttattctgttcaaagagatgctgcacaagggacttaaacctacaacctttaattataacgtcatactggatggattatttctggctggacgaactgttgctgcaaaggaaaagtttgacgagatggttgaatctggagtaagtgtgtgcattgatacatattcgatagttcttggtggactttgtagaaataattgtagcggcgaagcaatcacgctattccagaaattaagcacaatggaagtgaaattcaatattacaattgtcaatataatgattgatgctttctacaaggttcagcgaaaccaagaagccaaggatttgtttgctgcagtatcagccaatggtttggtagctgatgtctttacctacaccagaatgatgaaaaatcttataaaagaagggtcagtggaagaagctgacgatctctttttatcaatggagaagagcggctgtactgctgactcttatatgttaaatcttatcgttagaatgtttctgggaaaaggagagatagtcaaggctgggaattatatatctaaaattgatgcaaagagctactcacttgaagctaaaactgtttcgctgcttatctctctcttttcagggaaagggaaatatagagaacacataggattgctccctgcaaagtatcggtttcgtgaagaagcagccacagttgtg

SEQ ID NO: 1899 - DNA, 2337 bp, Triticum aestivum
atgtcgccaccccgcctccgcctccgactctgcgcccgccactcctcctccacctctcatccctcacgcatctgggatccccacgccgccttcgccgccgccacggaacgtgcgcgctctggcaacctcacccccgaggacgcacaccacctgtttgacgaattgctgcggcaggccaatcctgtccaggagcgccccctcaacaaccttcttgccgccctcgcccgtgctccggcgtccgcggcgtgcagcgatggccctgcactcacagtcaatctcttcagccgcatatcccaaggcgcccgccgacgtgtggcgcacccaacggcctgcacctatggcatcctcatggactgctgctgccgcgcacaccgcctcgatctggcgttcgctttcttcggctgtctcctcaggacgggacttaaggcaggcgtcattcaagtttgcactcttctcaagggcctttgccgcgcaaagcgggctgatgaggctctggacatgctgcttcacaggatgcctgagctgggctgcacccccaacgtggtggcatataccacggtcatccacggcttctttaaggaaggccaagtaggcaaggcatgcaatctgttccatggaatggcgcagcagggcgttatgcctgatgtggtgacatataactcagttatcgatgcgctgtgcaaggccagagcaatggacaaggcagagtatttccttcgtcagatggttgataatggtgtcgtacctaataatgtcacatataatagcctcatccatggatattcctcttcaggccattggaaggaggcagttagggtattcaaagagatgacaagtcggagggttacagcagatgtgcatacttacaacatgtttatgacctttctttgcaaacatggaagaagcaaagaagctgcaggaatttttgataccatggctatgaagggcctgaaacctgacagcgtttcatatgctattcgccttcatggatatgccaccaaaggatgcttagttgatatgattaatctcttcaattcaatggaaagagattgtattctacctgactgtcgtatcttcaacatactgattaatgcatatgctaaatctgggaagcttgataaggctatgcttatcttcaatgaaatgcagaaacaaggagtgagtccaaatgcagtcacatattcaactgtaatagatgcattttgcaaaaagggtcagttggacgatgctatgataaagtttaatcagatgattgatacaggagtacgacagggcacagctgtttatcgttccctaatccagggattttgtacacacagcgatttggtgaaagcaaaggaattgcttactgaaatgatgaacaaaggtatacctcctcctgatattaagttcttccattcaatcatgcagaacctatgcacagaaggaagggtaatagaagcacgggatatccttggcttgatagcacacataggtatgaggcctaatgtttgcacatttaatatactgattggtggatactgcctagtcggcaagatggaggatgcctcaaaaatatttgatgatatgatgtcatatggtttagaaccttgtaacattacgtatggtatacttattaatggctattgcaaaaatagaaggattgatgacgggcttattctgttcaaagagatgctgcacaagggacttaaacctacaacctttaattataacgtcatactggatggattatttctggctggacgaactgttgctgcaaaggaaaagtttgacgagatggttgaatctggagtaagtgtgtgcattgatacatattcgatagttcttggtggactttgtagaaataattgtagcggcgaagcaatcacgctattccagaaattaagcacaatggaagtgaaattcaatattacaattgtcaatataatgattgatgctttctacaaggttcagcgaaaccaagaagccaaggatttgtttgctgcagtatcagccaatggtttggtagctgatgtctttacctacaccagaatgatgaaaaatcttataaaagaagggtcagtggaagaagctgacgatctctttttatcaatggagaagagcggctgtactgctgactcttatatgttaaatcttatcgtcagaatgtttctgggaaaaggagagatagtcaaggctgggaattatatatctaaaattgatgcaaagagctactcacttgaagctaaaactgtttcgctgcttatctctctcttttcagggaaagggaaatatagagaacacataggattgctccctgcaaagtatcggtttcgtgaagaagcagccacagttgtg

SEQ ID NO: 1900 - DNA, 690 bp, Triticum aestivum
  misc_feature (512)..(512): n is a, c, g, or t
  misc_feature (612)..(612): n is a, c, g, or t
atggacaagttcaatgagatgactgatatgggttttcagccggacacaactgtttatcactccctaattcagggtttttgtatgcatggtgatttggttaaagctaaggggctggtttctgaaatgatgaacaaaggtattcctcgtcctgacattgcgttcttcaattcaataataaacactctatgcaaagaaggaggagttatggatgcacaagatgtctttgacttggttactgccatagatgagaggcctaatatcattacatttaattcactgattgatggatattgcttagttggcgagatggataaagcatttggagtacttgatgccatgaaatcagttggtgctgagcctgatattgttacatacaacacgcttgttaatggctattgtagaaatggaaggatcgatgatggtttgactctgttcagggaaatgccacataagagaataaaacctgacactgttacatatggcatcatactagatgggttgtttcatgctgnaagaactgtcgttgcaaggaaaatgttccatgagatgatcgaaagtgaaacracagtggacattcccgtatacaatayaatacttaaarrcctttttagntgtatcacatacaacctttcctcattaaaatcgtcgaggaaacaatgttttgacatcctatctgcaagatttcataaa

SEQ ID NO: 1901 - DNA, 963 bp, Triticum aestivum
atggacaagttcaatgagatgactgatatgggttttcagccggacacaactgtttatcactccctaattcagggtttttgtatgcatggtgatttggttaaagctaaggggctggtttctgaaatgatgaacaaaggtattcctcgtcctgacattgcgttcttcaattcaataataaacactctatgcaaagaaggaggagttatggatgcacaagatgtctttgacttggttactgccatagatgagaggcctaatatcattacatttaattcactgattgatggatattgcttagttggcgagatggataaagcatttggagtacttgatgccatgaaatcagttggtgctgagcctgatattgttacatacaacacgcttgttaatggctattgtagaaatggaaggatcgatgatggtttgactctgttcagggaaatgccacataagagaataaaacctgacactgttacatatggcatcatactagatgggttgtttcatgctgcaagaactgtcgttgcaaggaaaatgttccatgagatgatcgaaagtgaaacgacagtggacattcccgtatacaatataatacttaaaggcctttgtagaaataattgtgcagacgaagcgatcgccatgttccagaaattaggtgcaatgaatgtgaagtttgatattggaacactcaataccatgattaattcattgtacaaggttggaagaaaagaagaagctaaggatttgtttgctgcaatatcagccagcaggttggtgcctaatgcttctacttacagcataatgataataaattatctgaaggaaggatcagtggaagatgctaagcatatttttttcatcaatggacaagagtggtatagctcccagctctcgtcttataaactatatcatcagaatgttgtttttttgagaaaatatcatcagaatgttgttggaaaaagg

SEQ ID NO: 1902 - DNA, 627 bp, Triticum aestivum
atgaaatcagttggtgctgagcctgatattgttacatacaacacgcttgttaatggctattgtagaaatggaaggatcgatgatggtttgactctgttcagggaaatgccacataagagaataaaacctgacactgttacatatggcatcatactagatgggttgtttcatgctgcaagaactgtcgttgcaaggaaaatgttccatgagatgatcgaaagtgaaacgacagtggacattcccgtatacaatataatacttaaaggcctttgtagaaataattgtgcagacgaagcgatcgccatgttccagaaattaggtgcaatgaatgtgaagtttgatattggaacactcaataccatgattaattcattgtacaaggttggaagaaaagaagaagctaaggatttgtttgctgcaatatcagccagcaggttggtgcctaatgcttctacttacagcataatgataataaattatctgaaggaaggatcagtggaagatgctaagcatatttttttcatcaatggacaagagtggtatagctcccagctctcgtcttataaactatatcatcagaatgttgtttttttgagaaaatatcatcagaatgttgttggaaaaagg

SEQ ID NO: 1903 - DNA, 963 bp, Triticum aestivum; identical to SEQ ID NO: 1901

SEQ ID NO: 1904 - DNA, 522 bp, Triticum aestivum
atgccacataagagaataaaacctgacactgttacatatggcatcatactagatgggttgtttcatgctgcaagaactgtcgttgcaaggaaaatgttccatgagatgatcgaaagtgaaacgacagtggacattcccgtatacaatataatacttaaaggcctttgtagaaataattgtgcagacgaagcgatcgccatgttccagaaattaggtgcaatgaatgtgaagtttgatattggaacactcaataccatgattaattcattgtacaaggttggaagaaaagaagaagctaaggatttgtttgctgcaatatcagccagcaggttggtgcctaatgcttctacttacagcataatgataataaattatctgaaggaaggatcagtggaagatgctaagcatatttttttcatcaatggacaagagtggtatagctcccagctctcgtcttataaactatatcatcagaatgttgtttttttgagaaaatatcatcagaatgttgttggaaaaagg

SEQ ID NO: 1905 - DNA, 627 bp, Triticum aestivum; identical to SEQ ID NO: 1902

SEQ ID NO: 1906 - DNA, 627 bp, Triticum aestivum; identical to SEQ ID NO: 1902

SEQ ID NO: 1907 - DNA, 1962 bp, Triticum aestivum
atgccgagaagaagccggcccgcaggtggcatcctcatgggctgcttctgcggtgcgcatcgcccggacctagggcttgccttatttggccgcttcctcgggacaggcctcaagacaaacaagattgtggccaccaccttcctcaagtgcctctgctacgccaaacgtacagatgaggctgtcaacttgctgcttcgtaggatgcccgagcttggctgcgtgcctgatgcaatctcatacaccattgttctgaagagcttatgcgagaatagcatgagtcagcgggcacttgacctgctccagatggtggcagaaggaggaggtgcctgctccctcaatgtggtggtgtatagcacagtcatccatggcttcttcaaggagggcgaaacaggcaaggcatgcaatctattccatgaaatgatccatcaaggggttgtgcccaatgtggtcacgtatagctcgattattgatgcgttgtgcaaggccagagcaatggacaaggcagagctagtccttcaacagatggttgatagtggtgctcaaccaaataatgtgacatatacttgcatgatccatggatattccacatcagggcagttgaaagaggctgctaaaatgtttaggaaaatgacaacccggggtcttgtaccagatattgttacttgcagctcgttaatgactttcctttgcaagcatggaagaagcaaagaagcggcagaaattttttattccatgactgccaaaggcctcaaacctaatatcatcgcatactctattctgcttcacggatatgccaccgaaggatgctttgttgatatgaataatctctttaattcaatggaagacaatggtattgcagccaactgttatgttttcaacatattaatttatgcatatgctaaacgtggaatgatggatgaagctatgctcatatttaccgaaatgcgggaaaaaggagtgagtcccgatgtagtcacctattccactgtaatagccgcattttgcagattgcgtaggctggccaatgctatggacaagttcaatgagatgactgatatgggttttcagccggacacaactgtttatcactccctaattcagggtttttgtatgcatggtgatttggttaaagctaaggggctggtttctgaaatgatgaacaaaggtattcctcgtcctgacattgcgttcttcaattcaataataaacactctatgcaaagaaggaggagttatggatgcacaagatgtctttgacttggttactgccatagatgagaggcctaatatcattacatttaattcactgattgatggatattgcttagttggcgagatggataaagcatttggagtacttgatgccatgaaatcagttggtgctgagcctgatattgttacatacaacacgcttgttaatggctattgtagaaatggaaggatcgatgatggtttgactctgttcagggaaatgccacataagagaataaaacctgacactgttacatatggcatcatactagatgggttgtttcatgctgcaagaactgtcgttgcaaggaaaatgttccatgagatgatcgaaagtgaaacgacagtggacattcccgtatacaatataatacttaaaggcctttgtagaaataattgtgcagacgaagcgatcgccatgttccagaaattaggtgcaatgaatgtgaagtttgatattggaacactcaataccatgattaattcattgtacaaggttggaagaaaagaagaagctaaggatttgtttgctgcaatatcagccagcaggttggtgcctaatgcttctacttacagcataatgataataaattatctgaaggaaggatcagtggaagatgctaagcatatttttttcatcaatggacaagagtggtatagctcccagctctcgtcttataaactatatcatcagaatgttgttggaaaaagg

SEQ ID NO: 1908 - DNA, 1992 bp, Triticum aestivum
atgccgagaagaagccggcccgcaggtggcatcctcatgggctgcttctgcggtgcgcatcgcccggacctagggcttgccttatttggccgcttcctcgggacaggcctcaagacaaacaagattgtggccaccaccttcctcaagtgcctctgctacgccaaacgtacagatgaggctgtcaacttgctgcttcgtaggatgcccgagcttggctgcgtgcctgatgcaatctcatacaccattgttctgaagagcttatgcgagaatagcatgagtcagcgggcacttgacctgctccagatggtggcagaaggaggaggtgcctgctccctcaatgtggtggtgtatagcacagtcatccatggcttcttcaaggagggcgaaacaggcaaggcatgcaatctattccatgaaatgatccatcaaggggttgtgcccaatgtggtcacgtatagctcgattattgatgcgttgtgcaaggccagagcaatggacaaggcagagctagtccttcaacagatggttgatagtggtgctcaaccaaataatgtgacatatacttgcatgatccatggatattccacatcagggcagttgaaagaggctgctaaaatgtttaggaaaatgacaacccggggtcttgtaccagatattgttacttgcagctcgttaatgactttcctttgcaagcatggaagaagcaaagaagcggcagaaattttttattccatgactgccaaaggcctcaaacctaatatcatcgcatactctattctgcttcacggatatgccaccgaaggatgctttgttgatatgaataatctctttaattcaatggaagacaatggtattgcagccaactgttatgttttcaacatattaatttatgcatatgctaaacgtggaatgatggatgaagctatgctcatatttaccgaaatgcgggaaaaaggagtgagtcccgatgtagtcacctattccactgtaatagccgcattttgcagattgcgtaggctggccaatgctatggacaagttcaatgagatgactgatatgggttttcagccggacacaactgtttatcactccctaattcagggtttttgtatgcatggtgatttggttaaagctaaggggctggtttctgaaatgatgaacaaaggtattcctcgtcctgacattgcgttcttcaattcaataataaacactctatgcaaagaaggaggagttatggatgcacaagatgtctttgacttggttactgccatagatgagaggcctaatatcattacatttaattcactgattgatggatattgcttagttggcgagatggataaagcatttggagtacttgatgccatgaaatcagttggtgctgagcctgatattgttacatacaacacgcttgttaatggctattgtagaaatggaaggatcgatgatggtttgactctgttcagggaaatgccacataagagaataaaacctgacactgttacatatggcatcatactagatgggttgtttcatgctgcaagaactgtcgttgcaaggaaaatgttccatgagatgatcgaaagtgaaacgacagtggacattcccgtatacaatataatacttaaaggcctttgtagaaataattgtgcagacgaagcgatcgccatgttccagaaattaggtgcaatgaatgtgaagtttgatattggaacactcaataccatgattaattcattgtacaaggttggaagaaaagaagaagctaaggatttgtttgctgcaatatcagccagcaggttggtgcctaatgcttctacttacagcataatgataataaattatctgaaggaaggatcagtggaagatgctaagcatatttttttcatcaatggacaagagtggtatagctcccagctctcgtcttataaactatatcatcagaatgttgtttttttgagaaaatatcatcagaatgttgttggaaaaagg

SEQ ID NO: 1909 - DNA, 1992 bp, Triticum aestivum; identical to SEQ ID NO: 1908

SEQ ID NO: 1910 - DNA, 2364 bp, Triticum aestivum
atgcctcgtttctcctccaccacgtcaatgtcgtcactccgcctccgcctccacgcccgccactcctcctccgcctctcaaccctcacacagccagggatgggatccccacgccgccttcgccgccgcgacgcagcgtgcgcgctctggcagcctcaccccggcggacgcacaccacctgttcgacgaattgctgcggcaggccaatcctgtccaggagcgccccctcaacaaccttctcgccgccatcgcccgcgctccggcgtccaacgcctgcagaaacggccctgcactcgcggtcgccctcttcagccgcatatcccaaggcgcccgcctatgggtggtgcagccaacggcttgcacctacggcatcctcatggactgctgctgccgtgcacgccgccctgatctgtcactcgccttctttggccgtctcctcaagacgggcctggaggcaaaccaagtcgtcttcaacaccctcctcaagggcctttgccacacaaagcgggcggatgaggctctagacgtgctgctgcacaggatgcctgagctgggctgcacccccgacgtggtggcgtataacaccgttatccatggcttctttaaggagggccatgtaagcaaggcctgcaatctgttccatgaaatggcgcagcagggcgttaagcctaatgtggtgacatataactcagttatcgatgcgctgtgcaaggccagagccatggacaaggcagaggtggtccttcgtcagatgattgatgatggtgttggacctgataatgtgacgtatagtagcctcatccatggatattcctcttcaggccactggaaggaggcagttagggtattcaaagagatgacaagtcggagggttacaccaaatgtgcatacttacaacatgtttataacctttctttgcaaacatggaagaagcaaagaagctgcaggaatttttgattccatggctatgaagggcctgaaacctgacaacgtttcatatgctattctccttcatgggtatgccaccgaaggatgcttagttgatatgattaatctcttcaattcaatggaaagagattgtattctacctaactgtcgtatcttcagcatactgattaatgcctatgctaaatctgggaagcttgataaggcaatgcttatatttaaagaaatgcagaaacaaggagtgagtccagatgcattcacatattcaaccgtaatacatgcattttgcaaaaagggtaggttggatgatgctgtgataaagtttaatcagatgattgatacaggagtacgaccggacacggctgtttatcgttccctaatccagggattttgtacacatggcgatttggtgaaagcaaaggaatatgttactgaaatgatgaagaaaggtatgcttcctcctgatattatgttcttcagttcaatcatgcagaacctatgcacagaaggaagggtaacagaagcacgggatatccttgacttgatagtgcacattggtatgaggcctaatgttatcatatttaatttgctgatcggtggatactgcctagtccgcaagatggcagatgcattgaaagtatttgatgatatggtgtcatatggtttagaaccttgtaactttacgtatggtatacttattaatggctattgcaaaaatagaaggattgatgacgggcttattctgttcaaagagatgctgcacaagggacttaaacctacaacttttaattataacgtcatactggatggattatttctggctggacaaactgttgctgcaaaagagaagttcgatgagatggttgaatctggagtaagtgtgtgcattgatacatactctatagttcttggtggactttgtagaaatagctgcagtagcgaagcgatcacccttttccggaaattaagcgcaatgaatgtgaaatttgatattacaattgtcaatatcattattggtgccttatacagggtcgagagaaaccaagaggctaaggatttgtttgctgctatgccagccaatggcttggttcctaatgctgttacctacaccgtaatgatgacaaatcttataaaagaaggttcagtggaagaagctgacaatcttttcttatccatggagaagagcggctgtactgccaactcttgcctgttaaatcatatcatcagaaggttactggaaaaaggagagatagtcaaggctggaaattatatgtctaaagttgatgcaaagagctactcacttgaagctaaaactgtttcactgctgatctctctgttttcaaggaaagggaaatatagagaacacatcaaattgcttcctacaaagtatcagtttctggaagaagcagccacagttgaa

SEQ ID NO: 1911 - DNA, 2334 bp, Triticum aestivum
atgtccaacctccgcctcctacgccgcagctcctcctccatgtccaccaccaggtcgccactctcacgggtctggtccccccattcggcctttgccgcggccacagagcgcgtacgcaccgggacgctcagccaagacgatgcacaccacctgttcgacgaattgctgcggcagggcaatcctgtccaggagcgtcccttgaataactttctggctgccctcgcccgcgcgcccgcgtctgcatcctgcagcgatggccccgccctggccgtcgccctcttcggccgtttgtcccgaggcgccgggcaacgggtggcgcagccaaatgtgttcacctatggcgtcctcatggactgctgctgccgcgcttgccgcacagatctggcgctcgccttctttggccgtcttctcaggacgggcctgcaggcaggccaagtcgtcttcaacaccctcctcaagggcctttgccacacaaagcgggcggatgaggctctggacgtgcttcttcacaggatgcctgagctgggctgcacccccgatgtggtggcgtataacaccgtcatccatggcttctttagggaaggccaagtaggcaaggcatgcgatatgttccatggaatggcacagaagggtgttatgcctaatgtggtgacatataactcggttattgatgcgctgtgcaaggccagggccatggacaaagcagagacggtccttagtcaaatggtaaatgatggtgtccgacctgataacgtgacatataatagtctcattcatggatattcctctttgggcaattggaaggaggcggttagggtattcaaagagatgagtcggaggtttacaccagatgtcattacctgcacctcactcatggccttcctttgcaagaatggaaaaagcaaagaagctgcagaaatttttgattcaatggctatgaagggcctgaaacgtgacaccgtttcatatgctattctccttcatgggtatgccactgaaggatgcttggttgacatgattaatctcttcaattcaatggcaacagactgtattctacctaactgtcatatcttcaatatactgattaatgcatatgctaaatctggcatgatgggtgaggccatgcttatattcaaaaaaatgcacgaacaaggagtgagtccagatgtagtcacctattcaactgtaatacatgcattttgcaaaatgggtagcttggacattgctatggacaaatttaaccagatggttgatatgggagtacgaccgaatgcaattgtttatcattccctaatccagggtttttgtacacatggggatttagtgaaagcaaaggaattggttactgaaatgaggaacaaagctatgcgtcctcctgatattaagatcttccattcaataatgaagaacctatgcacggaaggaagggtaatagaagcacgggatatcctcgacttgatggtgcacataggtatgaggcctgatgttcccatctttaatttactgattggtggatactgcctagtccacaagatggaggatgcaacaaaaatgtttgatgatatggtgtcatatggtttagaaccttgtaacagtacgtatggtatacttattaatggctattgcaaaaacggaaggattgatgacgggctgaatctgttcaaagaaatgttgcgcaagggacttaaacctacaacttttaattacaacgtcatactggatggattatttctggctggacgaactgttgctgcaaaggaaaagtttgatgagatggttgaatctggagtaagtgtgtgcattgatacatattcgatagttcttggtggactttgtagaaataattgcaccggtgaagcaatcacgctgtccaagaaattaagtacaatgaatgtcaaattcaatattgcaattgtcaatatcttgattggtgcattcttcagggttcgacgaaaccaagaagctaaggatttgtttgccgcaataccagccaatggcttggtagctaatgttgttacctacagcatgatgatgataaatcttataaaagaagggtcactggaagaagctgacgatctctttttatcaatggagaagagcggctgtaccgctgactcttgtatgttaaatcatatcatcagaaggctactggaaagaggagagatagtcaaggctggaaattatatgtcgaaagttgatgcaaagagctactcacttgaagctaaaactgtttcgctgctgatctccctctttttagggaaagggagatatagagaacacatgaaattgctccctatgaagtatcagtttctcgaagaagcagccacagttgaa

SEQ ID NO: 1912 - DNA, 2370 bp, Triticum aestivum
atgcctcgcttctcctccaccacgcccatgtcgccactccgcctccgcctccgcctccgactcggcgcccgccactcctcctccacctcccattcctcacgcagctgggatccccactccgccttcgccgccgccgcggagcgtgcgcgctctggcaacctcaccccggaggacgcacaccacctgttcgacgaattgctccggcagggcaatcctgtccaggaccgccccttgaacaaacttctctccgccctcgcccgtgctccggcgtctgcggcctgtagaaacggccctgcactcgcggtcaacctcttcagccgcatatcccaaggtgcccgccgacgtgtggcggagccaacggcctgcacctacggcatcctcatggactgctgctgccgcgcacaccgcctcgatctgacgctggccttcttcggcggtctccttaagacgggacttaaggcaggcgtcattcaagtttgcactcttctcaagggcctctgccgcgcaaagcgggctgatgaggctctcgacgtgctgcttcacaggatgcctgagctgggctgcacccctgacgtggtggcatataccacggtcatccacggcttctttaaggaaggccaagtaggcaaggcatgcaatctgttccatggaatggcgcagcagggcgttgcgcctaatttggtgacatataactcggttattgatgcgttgtgcaaggccaaagcaatggacaaggcagagtatttccttggtcagatggttgatgatggtgtcgtacctgataatgtgacatataatagcctcatccatggatattcctcttcaggccactggaaggaggcagttagggtattcaaagagatgacaagtcggagggttacagcagatgtgcatacttacaacatgtttatgacctttctttgcaaacatggaagaagcaaagaagctgcaggaatttttgataccatggctatcaagggcctgaaacctgacaatgtttcatatgctattcgccttcatgggtatgccaccgaaggatgcttagttgatatgattaatctcttcaattcaatggaaagagattgtattctacctgactgtcgtatcttcagcatactgattaatgcatatgctaaatctgggaagcttgataaggctatgcttttatttaaagaaatgcagaaacaaggagtgagtccagatgcagtcacatattcaactgtaatagatgcattttgcaaaaagggtcagttggacgatgctatgataaagtttaatcagatgattgatacaggagtacgacagggcacagctgtttatggttctctaatccagggtttttgtacacacggcgatttggtgaaagcaaaggaattgcttactgaaatgatgaacaaaggtatacctcctcctgatattaagttcttccattcaatcatgcagaacctatgcacagaaggaagggtaatagaagcacaagatatccttgacctgatggtacacacaggtgagaggcctaatgttgtcacatttagtgtactggtcggtggatactgcctagtccgcaagatggcagatgcatcgaaagtatttgatgatatggtgtcatatggtttagaaccttgtaacattatgtatggaatacttattaatggctactgcaaaaatagaaggattgatgacgggcttattctgttcaaagagatgctgcacaagggacttaaacctacaacttttaattataacgtcatactgaatggattatttctggctggacaaactgttgctgcaaaagagaagtttgatgagatggttgaatctggagtaagtgtgtgcattggtacatactctatagttcttggtggactttgtagaaatggctgcagtagcgaagcgatcaccctgttccgaaaattaagcgcaatgaatgtgaaatttaatattacaattgtcaataccattattggtgccttctacagggtcgagagaaaccaagaggctaaggatttgtttgctgcagtatcagccaatggtttggtagctgatgtctttacctacaccataatgatgaaaaatcttataaaagaagggtcagtggaagaagctgacgatctctttttatcaatggagaagagcggctgtactgctgactcttatatgttaaatcttatcgtcagaatgtttctgggaaaaggagagatagtcaaggctgggaattatatatctaaaattgatgcaaagagctactcacttgaagctaaaactgtttcgctgcttatctctctcttctcagggaaagggaaatatagagaacacataggattgctccctgcaaagtatcggtttcgtgaagaagcagccacagttgtg

SEQ ID NO: 1913 - DNA, 2376 bp, Triticum aestivum
atgcctcgcttctcctccaccacgccaatgtcgccaccccgcctcctcctccggctcggcgcccgccactcctcctccacctctcatccctcacgcatctgggatccccacgccgccttcgccgctgcgacgcagcgggcgcgctctggcacgctcaccacggaggacgcacaccacctgtttgatgaattgctgcggcagggcaatcctgtccaggagcgtcccttgactaactttctggctgccctcgcccgcgcgcccgcgtccgcattctgcagcgatggccctgccctggccgtcgccctcttcggccgtttgtcccgaggcgccggacgacgggtggcgcagccaaatgtcttcacctatggcgtcctcatggactgctgctgccgtgcgcgccgcctggatctagcgatcgccttcttcgcccgtctcctcaagacgggactggaggcaaaccaagtcatcttctgcaccctcctcaagggactctgccacgcaaagcgctcagatgaggctttggacgtggtgcttcacaggatgcctgagctaggctgcacccccaacgtggtggcctataccacggtcatccacggcttcttgaaggaaggccaagtaggcaaggcatgcaatctattccatggaatggcgcagcagggcgttgcgcctgatgtggtgacatataactcggttatcgatgcgttgtgcaaggccagagcaatggacaaggcagagtatttccttcgtgaaatggttgataatggtgtcgtacctaataatgtgacatataatagcctcatccatggatattcctctttgggccatcagaaggaggctgttagggtgctgaaagaaatgacaagacagggtatcataccagatgtcattacctgcacctcactcatgaccttcctttgcaagaatggaaaaagcaaggaagctgcagaaatttttgattcaatggccacgaagggcctgaaacatgacgccgtttcatatgctattctccttcatgggtatgccactgaaggatgcttggttgatatgattaatctcttcaattcgatggacagagactgtattctacctaactgtcatatcttcaacatactgatttatgcatatgctaaatctgggaagcttgataaggctatgcttatatttagagatatgcagaaacaaggagtgagcccagatgcattcacatattcaaccttaatacatgcattttgtaaaaagggtcggttggacgatgctatgataaagtttaatcagatggttgatacaggagtacgacagggcacagctgtttatggttctctaatccagggtttttgtacacacggcgatttggtgaaaggaaaggaattggttactgaaatgatgaacaaaggtatacctcctcctgacattatgttcttccattcaatcatgcagaacctatgcacagaaggaagggtagtagaagcacgggatatccttggcttgatagcacacataggtatgaggcctaatgtttgcacatttaatatactgattggtggatactgcctagtccgcaagatggaggatgcctcaaaaatatttcatgatatgatgtcatatggtttagaaccttctaatgttacgtatggtattcttattaatggctattgcaaaaacagaaggattgatgacgggctgattctgttcaaagaaatgttgcgcaagggacttaaacctacaacttttaattacaacatcatactggatggattatttctggctggacgaactgttgctgcaaaggaaaagtttgatgagatggttgaatctggagtaagtatgtgcatcagtacttactctatagttcttcgtggactttgtagaaataattgtagcggcgaagccatcacgctattccagacattaagcgcaatggatgtgaaattcaatattagaattgtcaatatcatgattgatgccttcttcagggttcagcgaaagcaagaagctaaggatttgtttgctgcaataacagccaatgggttggttgctaatgtttttacctacagcctaatgatgacaaatcttataaaagaagggtcagtggaagaggctgacacactctttttatcgatggagatgagcggctgtacttcgaactcgtggatgttaaatcttattatcagagggttgctggaaaaaggagagatagtcaaggctggatgttatatgtctaaagttgatgcgaagagctactcacttgaagctaaaactgtttcgttgctgatctatctcttttcagggaaagggaaatacagagaacacataagattgctacctacaaagtatcagtttctcgaagaagcagccacagttgaatggtttgctata

SEQ ID NO: 1914 - DNA, 2376 bp, Triticum aestivum
atgcctcgcttctccaccaccacgccaatgtcgccaccccgcctcctcctccgactcggcgcccgccactcctcctccacctctcatccctcacgcatctgggatccccacgccgccttcgccgctgcgacgcagcgggcgcgctctggcacgctcaccacggaggacgcacaccacctgtttgatgaattgctgcggcagggcaatcctgtccaggagcgtcccttgactaactttctggctgccctcgcccgcgcgcccgcgtccgcattctgcagcgatggccctgccctggccgtcgccctcttcggccgtttgtcccgaggcgccggacgacgggtggcgcagccaaatgtcttcacctatggcgtcctcatggactgctgctgccgtgcgcgccgcctggatctagcgatcgccttcttcgcccgtctcctcaagacgggactggaggcaaaccaagtcatcttctgcaccctcctcaagggactctgccacgcaaagcgctcagatgaggctttggacgtggtgcttcacaggatgcctgagctaggctgcacccccaacgtggtggcctataccacggtcatccacggcttcttgaaggaaggccaagtaggcaaggcatgcaatctattccatggaatggcgcagcagggcgttgcgcctgatgtggtgacatataactcggttatcgatgcgttgtgcaaggccagagcaatggacaaggcagagtatttccttcgtgaaatggttgataatggtgtcgtacctaataatgtgacatataatagcctcatccatggatattcctctttgggccatcagaaggaggctgttagggtgctgaaagaaatgacaagacagggtatcataccagatgtcattacctgcacctcactcatgaccttcctttgcaagaatggaaaaagcaaggaagctgcagaaatttttgattcaatggccacgaagggcctgaaacatgacgccgtttcatatgctattctccttcatgggtatgccactgaaggatgcttggttgatatgattaatctcttcaattcgatggacagagactgtattctacctaactgtcatatcttcaacatactgatttatgcatatgctaaatctgggaagcttgataaggctatgcttatatttagagatatgcagaaacaaggagtgagcccagatgcattcacatattcaaccttaatacatgcattttgtaaaaagggtcggttggacgatgctatgataaagtttaatcagatggttgatacaggagtacgacagggcacagctgtttatggttctctaatccagggtttttgtacacacggcgatttggtgaaaggaaaggaattggttactgaaatgatgaacaaaggtatacctcctcctgacattatgttcttccattcaatcatgcagaacctatgcacagaaggaagggtagtagaagcacgggatatccttggcttgatagcacacataggtatgaggcctaatgtttgcacatttaatatactgattggtggatactgcctagtccgcaagatggaggatgcctcaaaaatatttcatgatatgatgtcatatggtttagaaccttctaatgttacgtatggtattcttattaatggctattgcaaaaacagaaggattgatgacgggctgattctgttcaaagaaatgttgcgcaagggacttaaacctacaacttttaattacaacatcatactggatggattatttctggctggacgaactgttgctgcaaaggaaaagtttgatgagatggttgaatctggagtaagtatgtgcatcagtacttactctatagttcttcgtggactttgtagaaataattgtagcggcgaagccatcacgctattccagacattaagcgcaatggatgtgaaattcaatattagaattgtcaatatcatgattgatgccttcttcagggttcagcgaaagcaagaagctaaggatttgtttgctgcaataacagccaatgggttggttgctaatgtttttacctacagcctaatgatgacaaatcttataaaagaagggtcagtggaagaggctgacacactctttttatcgatggagatgagcggctgtacttcgaactcgtggatgttaaatcttattatcagagggttgctggaaaaaggagagatagtcaaggctggatgttatatgtctaaagttgatgcgaagagctactcacttgaagctaaaactgtttcgttgctgatctatctcttttcagggaaagggaaatacagagaacacataagattgctacctacaaagtatcagtttctcgaagaagcagccacagttgaatggtttgctata

SEQ ID NO: 1915 - DNA, 2376 bp, Triticum aestivum; identical to SEQ ID NO: 1913

SEQ ID NO: 1916 - DNA, 2376 bp, Triticum aestivum; identical to SEQ ID NO: 1914

SEQ ID NO: 1917 - DNA, 2364 bp, Triticum aestivum
atgcctcgcttctcctccaccatgccaatgtcgccaccccacctcctcctccgactctgcgcccgccactcctcctccacctctcatccctcacgcatctgggatccccacgccgcctttgccgccgcgacgcagcgggcgcgctctggcacgctcaccacggaggacgcacaccacctgttcgacgaattgctgcggcagggcaatcctgtccaggagcgtcccttgactaactttctggctgccctcgcccgtgcgcccgcgtccgcatcctgcagcgacggccccgccctggccgtcgccctttttggccgtttgtctcgaggcgctggacgacgggtggcacagccaaatgtcttcacctatggcgtcctcatggactgctgctgccgtgcgcgtcgcctggatctagcgatcgccttcttcggtcgtctcctcaagacgggcctggaggcagaccgagtcgttttcagcaccctcctcaagggactctgccacgcaaagcgctcagatgaggctctggacgtgctgcttcacaggatgcctgagcagggatgcactccctatgtggtggcgtataacaccgtcatccatggcttctttagggaaggccaagtaggcaaggcgtgcgatctgttccatggaatggcacagcagggcgttatgcctgatgtggtgacatataactcggttatcgatgcgctgtgcaaggccagagcaatggacaaggcagagtatttccttcgtcagatggttgatgatggtgttgtacctaataatgtgacatataatagcctcatccatggatattcctcttcaggccattggaaggaggcaattagggtattcaaagagatgacaagtcggaggattacagcagatgtgcatacttacaatatgtttatgacctttctttgcaaacatggaagaagcgaagaagctgcaggaatttttgataccatggctatgaagggcctgaaacctgacaacgtttcatatgctattcgccttcatgggtatgccaccgaaggatgcttagttgatatgattaatctcttcaattcaatggaaagagactgtattctacctgactgttgtatcttcaacatactgattaatgcatatgctaaatctgggaagcttgataaggctatgcttatcttcaatgaaatgcagaaacaaggagtgagtccagatgcagtcacatatttacccgtaatagatgcattttgcaaaaagggtaggttggacgatgctatgattatgtttaatcagatgattgatacaggagtacgaccagccacagctgtttatacttccctaatccaaggtttttgtacacacggcgatttggtgaaagcaaaggaattggttactgaaatgatgaacaaaggtatacctcctcctgatattaagttcttccattcaatcatgcagaacctatgcacagaaggaagggtaacagaagcacgggatatccttggcttgatagcacacataggtatgaggcctaatgtttgcacatttaatatactgattggtggatactgcctagtccgcaagatgacagatgcatcgaaagtatttgatgatatggtgtcatatggtttagaaccttgtaactttacgtatggtatacttattaatggctattgcaaaaatagaaggattgatgacgggcttactctgttcaaagagatgctgcacaagggacttaaacctaaagcttttaattataacgtcatactggatggattatttctggctggacaaactgttgctgcaaaagagaagtttgatgagatggttgaatctggagtaagtgtgtgcattgatacatactctatagttcttggtggactttgtagaaatagctgcagtagcgaagcgatcaccctgttccgaaaattaagcgcaatgaatgtgaaatttgatattacaattgtcaataccattattggtgccttctatagggtcgagagaaaccaagaggctaaggatttgtttgctgctattccagccagtggcttggttccgaatgttgttacctataccataatgatgaaaaatcttataaaagaaggttcagtggaagaagctgacaatctttttttatcgatggagaagagcggctgtagtgccaactcttatctgttaaatcatatcatcagaaggttactggaaaaaggagagagagtcaaggctggaaattatatgtctaaagttgatgcaaagagctactcacttgaagctaaaactgtttcgctgctgatctctctgttttcaaggaaagggaaatatagagaacacatcaaattgcttcctacaaagtatcagtttctggaagaagcagccacagttgaa

SEQ ID NO: 1918 - DNA, 2226 bp, Triticum aestivum
atgtcgccgctccgcctccatgcccgccgctcctactccacctcgcatcccccacgcagccagggctgggatccccacgccgccttcgcagctgccacggagcgcgcgcgatctggcaacctcacctcggaggacgcacacaagctgttcgaccaattgctcctgcaggctaatccggtcaacatgcgccttcccaacgaccttctcaccgccctggctcgcgcgcctgcgtccgcagcctgcagcaacggccccgccctcgccgtcaccctcttcacccgtttgtcccgaggtgcccgccaaccggtggtgcagccaacggcctgcacctacggcatcctcatggactgctgctgccgcgcaaaccgtcaggatctggcgctcgccttcttcgcccgtctcctcaggacgggactcaaggcaggcgtcatagaagtcaacactcttctcaagggactctgccgcgcaaagcgggctgatgaggctctggacattctgcttcacaggatgcctgagcttggctgcacccccaacgtggtggcctataccacggtcatccacggcttcttgaaggaaggccaagtaggcaaggcatgcaatctattccatggaatggcgcagcagggcgttgcacctaatgtggtgacatataactcggttattgatgcgctgtgcaaggccagagccatggacaaggcagagtatttccttcgtcaaatggttgataatggtgtcgtacctgataatgtgacatataatagcctcatccatggatattcctcttcaggccattggaaggaggcggtaagggtgctgaaagaaatgacaagtcaaggtatcatacctgatatcgtttcataccgtattctgcttcatgggtatgccaccaaagggtgcttagttgatatgattaatctcttcaattcaatggcaagatactgtattctacctgattgtcatatcttcaacatactgattaatgcatatgctaaatctgggaagcttgataaggctatgcttatatttaaagaaatgcagaaacaaggagtgagtccagatgcagtcacatattcaaccgtaatacatgcattttgcaaaaatggcaggttggacgatgctgtgataaagtttaatcaaatgattgatacaggagtacaaccggacacatctgtttataatgccctaatccaggggttttctacaaatggcgatttggtgaaggcaaaggaattggttacggaaatgatgaacaaaggtatacctcctcctgatattaagttcttccattcaatcatgcagaacctatgcacagaaggaaggttaacagaagcacgggatatccttggcttgatagcacacataggtatgaggcctaatgtttgcacatttaatatactgattggtggatactgcctagtccgcaagatggcagatgcatcgaaagtatttgatgatatggtgtcatatggtttagaaccttgtaactttacgtatggtatacttattaatggctattgcaaaaatagaaggattgatgacgggcttattctgttcaaagagatgctgcacaagggacttaaacctacaacttttaattataacgtcatactggatggattatttctggctggacaaactgttgctgcaaaggaaaagtttaatgagatggttgaatctggagtaagtgtgtgcattgatacatactcgatagttcttggtggactttgcacaaataactgttgcggcgaagccatcacgctattccagaaattaagcacaatggaagtgaaattcgatattataattgtcaataccatgattgatgccttctacagggttcggcaaaaccaagaagctaaggatttgtttgctgcagtatcagccaatggtttggtagctaatgtctttacctacaccataatgatgacaaatcttataaaagaagggtcactggaagaagctgacaatctctttttatcaatggagaagagcggctgtactgctgactcttttatgttaaatcttatcattagaaggttactggaaaaaggagagatagtcaaggctggaaattatatttctaaagttgatgcaaagagctactcccttgaagctaaaactgtttcgcttcttatctctctcttttcagggaaagggaaatatagagcacacatcagattgctcccttcaaagtatcagtttcgtgaagaagcaggcacagttgaa

SEQ ID NO: 1919 - DNA, 861 bp, Triticum aestivum
atgaggcctaatgtttgcacatttaatatactgattggtggatactgcctagtccgcaagatggcagatgcatcgaaagtatttgatgatatggtgtcatatggtttagaaccttgtaactttacgtatggtatacttattaatggctattgcaaaaatagaaggattgatgacgggcttattctgttcaaagagatgctgcacaagggacttaaacctacaacttttaattataacgtcatactggatggattatttctggctggacaaactgttgctgcaaaggaaaagtttaatgagatggttgaatctggagtaagtgtgtgcattgatacatactcgatagttcttggtggactttgcacaaataactgttgcggcgaagccatcacgctattccagaaattaagcacaatggaagtgaaattcgatattataattgtcaataccatgattgatgccttctacagggttcggcgaaaccaagaagctaaggatttgtttgctgcagtatcagccaatggtttggtagctaatgtctttacctacaccataatgatgacaaatcttataaaagaagggtcactggaagaagctgacaatctctttttatcaatggagaagagcggctgtactgctgactcttttatgttaaatcttatcattagaaggttactggaaaaaggagagatagtcaaggctggaaattatatttctaaagttgatgcaaagagctactcccttgaagctaaaactgtttcgcttcttatctctctcttttcagggaaagggaaatatagagcacacatcagattgctcccttcaaagtatcagtttcgtgaagaagcaggcacagttgaa

SEQ ID NO: 1920 - DNA, 867 bp, Triticum aestivum
atgcagaaacaaggagtgagtccagatgcagtcacatattcaaccgtaatacatgcattttgcaaaaatggcaggttggacgatgctgtgataaagtttaatcaaatgattgatacaggagtacaaccgaacacatctgtttataatgccctaatccaggggttttctacaaatggcgatttggtgaaggcaaaggaattggttacggaaatgatgaacaaaggtatgcatcctcctgatattaaggtcttccattcggtaatgcagaacctatgcacagaaggaagggtaacagaagcacgggatatccttgacttgatagtgcacataggtatgaggcctgatgttttcacatttacttcactgatcggtggatactgcctagtccgcaacatggaggatgcatcaaaaatatttgatgatatggtgtcatatggtttagaaccttctaacatcacgtatggtatacttattaatggctattgcaaaaacaaaaggattgatgaggggctgattctgttcaaagaaatgttgcgcaagggacttaaacctacaactattaattacaatgtcatattggatggattatttctggctggacgaactgttgctgctaaggaaaagtttaatgagatggttgaatctggagtaagtgtgtgcattgatacatattcgatagttcttggtggactttgcacaaataactgttgcggcgaagccatcacgctattccagaaattaagcaaaatgaatgtgaaattcaatattagaattgtcaatatcatgattgatgccttcttcaaggttcagcgaaagcaagaagctgaggatttgtttgctgcaatatcagcaaatgggttggtttgc

SEQ ID NO: 1921 - DNA, 2307 bp, Triticum aestivum
atgccccgtcgtctcccacccgtcttgctcccacttcacaccaaggccatgcctcgcctctcctccaccacgcccatgtcgccactccgcctccgcctccgcctccgcgcccgccactccgcctccacctcccattcctcacgcagctgggagccccacgccgccttcgccgccgccacggagcgcgcgcgctcttgcaacctcaccccggaggacgcacaccacctgttcgacgaattgctgcggcaggccaaacctgtccaggagcgccccctcaacaaccttcttgccgccctcgcccgtgctccggcgtccgcggcgtgcagcgatggccctgcactcgcggtcaacctcttcggccgcatatcccaaggcgcccgccgacgtgtggcgcacccaacggcctgcacatacggcatcctcatggactgctgctgccgcgcacaccgcctcgatctggcgttcgctttcttcggccatctcctcaggacgggacttaaggcaggcgtcattcacgtttgcactcttctcaagggcctctgccgcgcaaagcgggctgatgaggctctcgacgtgctgcttcacaggatgcctgagctgggctgcactcccgatgtggtggcatataccacggtcatccacggcttctttaaggaaggccaagtaagcaaggcatgcaatctattccatgaaatggcgctgcagggcgttgcacctaatgtggtgacatatagctcggttattgatgcgctgtgcaaggccagagccatggacaaggcagagtatttccttcgtcagatggttcataatggtgtcctagctaataatgtgacatataatagcctcatccatggatattcctcttcaggccattggaaggaggcggttagggtgctgaaagaaatgacaagtcaaggtatcatacctgatatcgtttcataccgtattctgcttcatgggtatgccaccgaagggtgcttagttgatatgattaatctcttcaattcaatggcaagatactgtattctacctgattgtcatatcttcaacatactgattaatgcatatgctaaatctgggaagcttgataaggctatgcttatatttaaagaaatgcagaaacaaggagtgagtccagatgcagtcacatattcaaccgtaatacatgcattttgcaaaaatggcaggttggacgatgctgtgataaagtttaatcaaatgattgatacaggagtacaaccgaacacatctgtttataatgccctaatccaggggttttctacaaatggcgatttggtgaaggcaaaggaattggttacggaaatgatgaacaaaggtatgcatcctcctgatattaaggtcttccattcagtaatgcagaacctatgcacagaaggaagggtaacagaagcacgggatatccttgacttgatagtgcacataggtatgaggcctgatgttttcacatttacttcactgatcggtggatactgcctagtccgcaacatggaggatgcatcaaaaatatttgatgatatggtgtcatatggtttagaaccttctaacatcacgtatggtatacttattaatggctattgcaaaaacaaaaggattgatgaggggctgattctgttcaaagaaatgttgcgcaagggacttaaacctacaactattaattacaatgtcatattggatggattatttctggctggacgaactgttgctgcaaaggaaaagtttaatgagatggttgaatctggagtaagcgtgtgcattgatacatattcgatagttcttggtggactttgcacaaataactgttgcggcgaagccatcacgctattccagaaattaagcaaaatgaatgtgaaattcaatattagaattgtcaatatcatgattgatgccttcttcaaggttcagcgaaagcaagaagctgaggatttgtttgctgcaatatcagcaaatgggttggttgctaatgtttttacctacagcctaatgatgacaaatcttataaaagaagggtcagcggaagaagctgacactctctttttatcgatggagaagagcggctgtactgccaactcgtggatgttaaatcttattatcagaaggctactggaaaaaggagagatagtgaaggctggaaattatatggctaaagtcgatgcaaagagctactcacttgaagctaaaacggtttcgctgctgatttctctcttttcagggaaagggaaatacagagaacacataagattgctgcctacaaagtatcagtttcgtgaagaagcagccacagttgaa

SEQ ID NO: 1922 - DNA, 2349 bp, Triticum aestivum
atggctcgcctctgcttcaccacgcccatgccgcacctccgccgccgctactcctccttcacctcgcctccttcacgccgctgggacccccgacccgcctttgccgcagccacggagcgcgtccgcgccgggacgctcagccctgaagacgcacaccacctgttcgacgaattgctactgcaggccaaccccgtccccgagcgctccctcaacggcttccttgccgcgctcgcccgtgctccgtcctccgctactctcagagatggaccctcccttgctctcgccctcttcaaccgtgtctgccgagaagaagcaggaccgccggtggcgccgcccacagtccgcacctacaacatcctcatggacagctgctgccgtgcacgccgcccggacctaggccttgccttcttcggccgcttcctgagggcgggcctcaaggtaaacctgattgtcgccagcaccctactcaagtgcctctgccatgcaagacggacagatgaggctgtcaacatgctgcttcataggatgtccgagttcggttgtgtgcctgatgccatctcatactccatagtacttaagggcttatgtgacaatagcaggagccagcaagcgctcgatctgctccagatggtaaggaaaggaggtgcctgctccctcagtgtggtggcatatagcataatcatacatggcttctttaaggaaggggaagtaagcaaggcatgcaatctgttccatgaaatgatgcagcaaggggttgtaccagatgtggtcacatatagctccattattgatgcgctgtgcaaggtcagggcaatggacaaggcaaagttggtccttcagcagatggttaataatggtgttcgaccaaatatgtatacttggaactcattcatgtactccctgtgcaagcatggaagaagcaaagaagctgcagaattttttaactccatgaccgccaagggcctcaaacctgatattgtcgcgtactctactcttcttcacgggtatgctaccgaaggatgcctcaccgatatgattaatttctttaattcaatggaacgcaatggtattgtagccaactgcaaagttttcaccatattaattgatggatatgctaaatgtggaatgacagatgaagctatgctcatctttaccaaaatgcaagaacaaggagtaagtcctaatgtattcacctatgcaattgtaacagctgcactttgcagaatgggcaggctgtctgatgcaatggaaaaactaaatgagatgattgcaatgggcttacaaccgaacaaggttgtttatcactctctaattcaggtcttttgtacacatggtgatttggtgaaagcaaaggccttggtttctgaaatgatgaacaaaggtattcctcgtccaaacattgtgttcttcaactcagtaataaacagtctatgcaaggaaggaagagttacagatgcacacgatatcttcgacttggctataaacattggtgagaggcctgacgttattacatttaattcactgattgacggatattgtttagccgggaagatggataaagcattcggagtacttgatgccatggtttcatctggcattgagcccaatgttgtcacatacaatacacttgttggtggctattctagaaatggaaggattgatgatgggttgaccctattcagagaaatgatgcatatcaaaattaaacctacaactgcaacatatggcgccatacttcatgggttgtttcgtgctggcagaactttttctgcgaagaaaatgttcaatgagatgattgaaagtggaacaacagtgaacatttccatatatgctataattcttggaggactttgtagaaacaattgcgttgatgaagcaatcgtcttgttcgagaaattaggtgcaatgaatgtgaagttggatgttggaatattcaataccatgattaatgcaatgtacgcggttaagggaagagaagaagctgaggatttgtttgctgcaatatcagccaatgggttggtacctaatgcttcttcttacggtgttatgataacaaatcttctaagagaaggattagtggaagaagctgacaatatgttttcatcaatggacaagagtggttgtgctcctagctctcgtctgttaaataatatcatcagaatgttattggaaaaaggtgagatatctaaggctggaaattatatgtctaaagttgatggaaagaatatctcacttgaagcttcaactacttcactgctgctgtctctcttttcaagggaaggcaaatatcgggagcaaataaaattgctccctgccaagtatcaattttttgatggatccagccatagt

SEQ ID NO: 1923 - DNA, 2349 bp, Triticum aestivum; identical to SEQ ID NO: 1922

SEQ ID NO: 1924 - DNA, 2349 bp, Triticum aestivum; identical to SEQ ID NO: 1922

SEQ ID NO: 1925 - DNA, 2349 bp, Triticum aestivum; identical to SEQ ID NO: 1922

SEQ ID NO: 1926 - DNA, 2349 bp, Triticum aestivum; identical to SEQ ID NO: 1922

SEQ ID NO: 1927 - DNA, 2349 bp, Triticum aestivum; identical to SEQ ID NO: 1922

SEQ ID NO: 1928 - DNA, 2328 bp, Triticum aestivum
atgtcgccaccccgcctccgcctgcacgcccgccactcctcctccgcctcgcaaccctcacgcagccagggctgggatccccacgccgcattcgccgccgccgcggagtgcgcacgctctggcaacctcaccccggaggacgcacacaacctgttcgaccaattgctgcagcatggcaatcctgtccaggagcgcgcactcaacagccttctcgccgccctcgcccgcacgccggcgtccgcggcgtgccgcgacggccctgccctcacggtcgccctcttcagccgcatatccaaaggacgggtggcgcagccaaatgtcttcacctatggcgtcctcatggcggactgctgctgccgtgcacaccgcccggatctgacactagcgttcttcggccgtttcctcaggacgggcctggaggcagaccaagtcgtcttcaacaccctcctcaagggcctttgccatgcaatgcgggcaggtgaggccgtgaacgtgcttcttcacaggatgcctgacctgggctgcactcccaatgtggtggcgtataacaccgtcatccatggcttctttagggaaggccaagcaggcaaggcatgcgatatgttccatggaatggcacagaagggcgttatgcctaatgtggtgacatataactcggttattgatgcactgtgcaaggccagggccatggacaaagcagagacggtccttagtcaaatggtaaatgatggtgtccgacctgataacgtgacatataatagtctcatccatggttattcctctttgggcaattggaaggaggcggttagggtattcagagagatgagtcagaggtttacaccagatgtcgttacctgcacctcactcatggccttcctttgcaagaatggaaaaagcaaagaagctgcagaaatttttgattcaatggccaccaagggcctgaaacgtgacaccgtttcatatgctattctccttcatgggtatgccaccgaaggatgcttggttgatatggataatctcttcaattcaatggtaagaggctgtattgtaccggactgtcatatcttcaacatactgattgatgcatatgctaaatctgagaagcttgataaggctatgcttatgtttaaagaaatgcagaaacatggagtgagtccaaatgcagtcacatatccaaccgtaatacatgcattttgcaaaatgggtagcttggacattgctatggacaaatttaaccagatggttgatatgggagtacgaccgaatgcaattgtttatcattccctaatccagggtttttgtacacatggggatttagtgaaagcaaaggaattggttactgaaatgaggaacaaagctatgcgtcctcctgatattaagttcttccattcaataatgcagaacctatgcacggaaggaagggtaatagaagcacgggatatcctcgacttgatgctgcacataggtatgaggcctgatgttcccatctttaatttactgatcggtggatactgcctagtccgtgagatggaggatgcaacaaaaatgtttgatgatatgatgtcatatggtttagaaccttgtaacaatacgtatggtatacttattaatggctattgcaaaaacggaaagattgatgatgggctgaatctgttcaaagagatgctgcacaagggacttaaacctacaacttttaattataacgtcatactggatggattatttctggctggacgaactgttgctgcaaaggtgaagtttaatgagatggttgaatctggagtaagtgtgtgcattgatacatactctatagttcttggtggactttgtagaaataattgcaccggtgaagcaatcacgctgtccaagaaattaagtacaatgaatgtcaaattcaatattgcaattgtcaatatcttgattggtccattcttcagggttcggcgaaaccaagaagctaaggatttgtttgccgcaataccatccaatggcttggtagctaatgttgttacctacagcataatgatgacaaatcttgtaaaagaagggtctgtggaagaagctgacactctctttttatcaatggagaagagcgggtgtactgccaactcttgtatgttaaatcatataatcagaaggttactggaaaaaggagagatagtcaaggctcgaaattatatgtcgaaagttgatgcaaagagctactcacttgaagctaaaactgtttcgctgctgatctccctcttttcagggaaagggaaatatagagaacgcaaaaaattgctccctatgaagtatcagtttctcgaagaagcagccacagttgaa

SEQ ID NO: 1929 - DNA, 969 bp, Triticum aestivum
atgcttcctcctgatattgcattcttcaattcaatcatgcagaacctttgcacagaaggaagggtaatagaagcacgggatgtccttggcttgatagcgcacataggtatgaggcctgatgtttgcacatttaatatactgatcggtggatactgcctagtcggcaagatggaggatgcctcaaaaatatttgatgatatgatgtcatatggcttagaaccttctaatattacgtatggtatacttattaatggctattgcaaaaatagaaggattgatgacgggcttattctgttcaaagagatgctgcacaagggacttaaacctacaacttttaattataacgtcatactggatggattatttctggctggacgaactgttgctgcaaaggaaaagtttgatgagatggttgaatctggagtaagtgtgtgcattggtacatattcgatagttcttggtggactttgtagaaataattgtagtggcgaagcaatcacgctattccagaaattaagcacaatggatgtgaaattcaatattacaattgtcaatataatgattgatgccttctacagggttcagcgaaaccaagaagccaaggatttgtttgctgcagtatcagccaatggtttggtagctaatgtttttacctacaccataatgatgaaaaatcttataaaagaagggtcagtggaagaagctgacgatctctttttatcaatggagaagagcggctgtactgctgactcttatatgttaaatcttatcgtcagaatgttactggaaaaaggagagctagtcaaggctgggaattatatgtctaaagtagatgcaatgagctactcacttgaagctgaaaccgtttcgctgcttatctctctcttttcggggaaagggaaatatagagaacacataggattgctccctgcaaagtatcggtttcgtgaagaagcagccacagttgtg

SEQ ID NO: 1930 - DNA, 1989 bp, Triticum aestivum
atggactgttgctgccgcgcacaccgcctcgatctggcgttcgctttcttcggccgtctcctcaggacgggacttaaggcaggcgtcattcaagtttgcactcttctcaagggcctctgccgcgcaaagcgggctgatgaggctctcgacgtgctgcttcacaggatgcctgagctgggctgcactcccgatgtggtggcatataccacggtcatccacggcttctttaaggaaggccaagtaggcaaggcatgcaatctgttccatggaatggcgcagcagggcgttgcgcctaatttggtgacatataacttggttattgatgcgttgtgcaaggccaaagcaatggacaaggcagagtatttcctcggtcagatggttgatgatggtgtcgtacctgataatgtgacatataatagcctcatccatggatattcctcttcaggccactggaaggaggcagttagggtattcaaagagatgacaagtcggagggttacagcagatgtgcatacttacaacatgtttatgacctttctttgcaaacatggaagaagcaaagaagctgcaggaatttttgataccatggctatgaagggcctgaaacctgacaacgtttcatatgctattctccttcatgggtatgccaccgaaggaagcttagttgatatgattaatctcttcaattcaatggaaagagactgtattctacctgactgttgtatcttcaacatactgattaatgcatatgctaaatctgggaagcttgataaggctatgcttatcttcaatgaaatgcagaaacaaggagtgagtccaaatgcagtcacatattcaaccataatacatgcattttgcaaaaattgtaggttggacgatgctgtgataaagtttaatcagatgattgatacaggagtacgacagggcacagctgtttatcgttccctaatccagggtttttgtacacacggcgatttggtgaaagcaaaggaattgcttactgaaatgatgaacaaaggtatgcttcctcctgatattgcattcttcaattcaatcatgcagaacctttgcacagaaggaagggtaatagaagcacgggatgtccttggcttgatagcgcacataggtatgaggcctgatgtttgcacatttaatatactgatcggtggatactgcctagtcggcaagatggaggatgcctcaaaaatatttgatgatatgatgtcatatggcttagaaccttctaatattacgtatggtatacttattaatggctattgcaaaaatagaaggattgatgacgggcttattctgttcaaagagatgctgcacaagggacttaaacctaaaacttttaattataacgtcatactggatggattatttctggctggacgaactgttgctgcaaaggaaaagtttgatgagatggttgaatctggagtaagtgtgtgcattggtacatattcgatagttcttggtggactttgtagaaataattgtagtggcgaagcaatcacgctattccagaaattaagcacaatggatgtgaaattcaatattacaattgtcaatataatgattgatgccttctacagggttcagcgaaaccaagaagccaaggatttgtttgctgcagtatcagccaatggtttggtagctaatgtttttacctacaccataatgatgaaaaatcttataaaagaagggtcagtggaagaagctgacgatctctttttatcaatggagaagagcggctgtactgctgactcttatatgttaaatcttatcgtcagaatgttactggaaaaaggagggctagtcaaggctgggaattatatgtctaaagtagatgcaatgagctactcacttgaagctgaaaccgtttcgctgcttatctctctcttttcggggaaagggaaatatagagaacacataggattgctccctgcaaagtatcggtttcgtgaagaagcagccacagttgtg

SEQ ID NO: 1931 - DNA, 1032 bp, Triticum aestivum
atggactgttgctgccgcgcacaccgcctcgatctggcgttcgctttcttcggccgtctcctcaggacgggacttaaggcaggcgtcattcaagtttgcactcttctcaagggcctctgccgcgcaaagcgggctgatgaggctctcgacgtgctgcttcacaggatgcctgagctgggctgcactcccgatgtggtggcatataccacggtcatccacggcttctttaaggaaggccaagtacgcaaggcatgcaatctgttccatggaatggcgcagcagggcgttgcgcctaatttggtgacatataacttggttattgatgcgttgtgcaaggccaaagcaatggacaaggcagagtatttcctcggtcagatggttgatgatggtgtcgtacctgataatgtgacatataatagcctcatccatggatattcctcttcaggccactggaaggaggcagttagggtattcaaagagatgacaagtcggagggttacagcagatgtgcatacttacaacatgtttatgacctttctttgcaaacatggaagaagcaaagaagctgcaggaatttttgataccatggctatgaagggcctgaaacctgacaacgtttcatatgctattctccttcatgggtatgccaccgaaggaagcttagttgatatgattaatctcttcaattcaatggaaagagactgtattctacctgactgttgtatcttcaacatactgattaatgcatatgctaaatctgggaagcttgataaggctatgcttatcttcaatgaaatgcagaaacaaggagtgagtccaaatgcagtcacatattcaaccataatacatgcattttgcaaaaagggtaggttggacgatgctgtgataaagtttaatcagatgattgatacaggagtacgacagggcacagctgtttatcgttccctaatccagggtttttgtacacacggcgatttggtgaaagcaaaggaattgcttactgaaatgatgaacaaaaggtatgcttcctcc

SEQ ID NO: 1932 - DNA, 2364 bp, Triticum aestivum
atgcctcgcttctcctccaccacgccaatgtcgccaccccgcctcctcctccggctccgcgcccgccactcctcctccacctctcatccctcacgcatctgggatccccacgctgccttcgccgccgccacggaacgtgggcgctctggcaacctcaccccggaggacgcacaccacctgttcgacgaattgctctggcagggcaatcctgtccaggaccgccccttgaacaaacttctctccgccctcgcccgtgctccggcgtccgcggcctgcagaaacggccctgcactcgcggttgccctcttcagccgcatatcccaaggtgcccgccgacgggtggcggagccaacggcctgcacctacggcatcctcatggactgctgctgccgcgcacaccgcctggatctggcgctcgccttcttcgcccgtctcctcaagacgggcctggaggcaaaccaagtcatcttcaacaccctcctcaagggactctgccacgcaaagcgctcagatgaggctctggacgtgctgcttcacaggatgcctgagctgggctgcacccccggcgttgtggcgtataacacggtcatccatggcttcttcaaggaaggccaagtaggcaaggcgtgcaatctattccatgaaatggtgcagcagggtgttatgcctgatgtggtgacatataactcggttaccgatgcgctgtgcaaggccagaggaatggacaaggcagagtatttccttcgtcaaatggttgatgatggtgtcgtacctgatactgtgacttataatagcctcatccatggatactcctcttcaggccactggaaggaggcagttagggtattcaaagagatgacaagtcggagggttacaccagatgtgcatacttacaacatgtttataacctttctttggaaacatggaagaagcaaagaagctgcaggaatttttgattccatggctatgaagggcctgaaacctgacaacgtttcatatgctattctccttcatgggtatgccaccgaaggatgcttagttgatgtgattaatctcttcaattccatggcaacagactgtattctacctaactgtcatatcttcaacatactgattaatgcatatgctaaatctgggaagcttgataaggctatgcttatatttagagaaatgcagaaacaaggagtgagcccagatgcattcacatattcaaccttaatacatgcattttgtaaaaagggtcggttggacgatgctatgataaagtttaatcagatggttgatacaggagtacgacagggcacagctatttatggttctctaatccagggtttttgtacacacggcgatttggtgaaaggaaaggaattggttactgaaatgatgaacaaaggtatacctcctcctgatattatgttcttccattcaatcatgcagaacctatgcacagaaggaagggtaatagaagcacgggatatccttggcttgatagcgcacataggtatgaggcctaatgtttgcacatttactatactgatcggtgggtactgcctagtctgcaagatggaggatgcaacaaaaatgtttgaggatatggtgtcatttggtttagaaccttgtaatattacgtatggtatacttattaatggctattgcaaaaatagaaggattgatgatgggcttattctgttccaagagatgctgcacaagggacttaaacctacaacttttaattataatgtcatactggatgggttatttctggctggacgaactgttgctgcaaaggaaaagtttgatgagatggttgaatctggagtaagtgtgtgcactgatacatattcgatagttcttgctggactttgcagaaataattgctctagcgaagtaatcatgctgttccagaaattaagggcaatgaacatggaattcaatattagaattgtcactatcatgattgatgccttctacaaggttcggcgaaaccaagaagctaaggatttgtttgctgcaataccatccaatggcttggtagctaatgttgttacctacagcataatgatgaaaaatcttataaaagaaggttcagtggaagaagctgacactctctttttatcaatggagaagagcggctgtactgcaaccccttggatgttaaatcatattatcagaaggttactggaaagaggagagatagtcaaggctggaaattatatgtcgaaagttgatgcaaagagctactcacttgaagctaaaactgtttcgctgctgatctccctcttttcagggaaagggaagtatagagaacacataaaattgctccctatgaagtatcagtttctcgaagaagcagccacagttgaa

SEQ ID NO: 1933 - DNA, 2355 bp, Triticum aestivum
atgtcgccactccgcctccgcctccgcctccggccccgcctccatgcccgccactcctactccacctcgcatcccccacgcggccagggctgggatccccacgcctccttcgcagctgccacggagcgcgcgcgatctggcaacctctcctcggaggacgcacaccacctgttcgaccaattgctcctgcaggctaatccggtcaacatgcgccttccgaacgaccttctcaccgccctggctcgcgcacctgcgtccgcatcctgcagcaacggccccgccctcgccgtcgccctcttcagccgtttgtcccaaggtgcccgccaacgggtggtgcagccaacggcctgcacctacggcatcctcatggactgctgctgccgcgcaaaccgccaggatctggcgctcgccttcttcgcccgtctcctcaggacgggactcaaggcaggcgtcatagaagtcaacactcttctcaagggactctgccgtgcaaagcgggctgatgaggctctggacattctgcttcacaggatgcctgagctaggctgcacccccaacgtggtggcatataacacggtcatccatggcttcttccaagaaggccaagcaggcaaggcgtgcagcttgttccatgaaatggcgcagcagggcgttgcgcctagtttggtgacatataactcggttattgatgcgctgtgcaaggccagagccatggacaaggcagagtatttccttggtcagatggttgatgatggtgtcatacctgataatgtgacatataatagcctcatccatggatattcctcttcaggccactggaaggaggcagttagggtattcaaagagatgacaagtcggagggttaaaccaaatgtgcatactcacaacatgtttatgacctttctttgcaaacatggaagaagcaaagaagctgcaggaatttttgataccatggctatgaagggcctgaaacataacaacgtttcatatgctattctccttcacgggtatgccaccgaaggatgcttagttgatatgattaatctcttcaattcaatggaaagatactgcattctacctgactgtcgtatcttcaacatactgattcatgcacatgctaaatctgggaagcttgataaggccatgcttatcttcaatgaaatgcagaaacaaggagtgagtccaaatgcagtcacatattcaaccataatacatgcattttgcaaaaagggtaggttggacgatgctgtgataaagtttaatcagatgattgatacaggagtacgacagggcacagctgtttatcgttccctaatccagggtttttgtacacacggcgattcggtgaaagcaaaggaattgctcactgaaatgatgaacaaaggtatgcttcctcctgatattgcattcttcaattcaatcatgcagaacctttgcacagaaggaagggtaatagaagcacgggatgtccttggcttgatagcgcacataggtatgaggcctgatgtttgcacatttaatatactgatcggtggatactgcctagtcggcaagatggaacatgcctcaaaaatatttgatgatatgatgtcatatggcttagaaccttctaatattacgtatggtatacttattaatggctattgcaaaaatagaaggattgatgacgggcttattctgttcaaagagatgctgcacaagggacttaaacctacaacttttaattataacgtcatactggatggattatttctggctggacgaactgttgctgcaaaggaaaagtttgatgagatggttgaatctggagtaagtgtgtgcattggtacatattcgatagttcttggtggactttgtagaaataattgtagcggcgaagcaatcacgctattccagaaattaagcacaatggatgtgaaattcaatattataattgtcaatataatgattgatgctttctacaaggttcagcgaaaccaagaagccaaggatttgtttgctgcagtatcagccaatggtttggtagctaatgtctttacctacaccataatgatgaaaaatcttataaaagaagggtcagtggaagaagctgacgatctctttttatcaatggagaagagcggctgtactgctgactcttatatgttaaatcttatcgtcagaatgttactgggaaaaggagagatagtcaaggctgggaattatatatctaaaattgatgcaaagagctactcacttgaagctaaaactgtttcgctgcttatctctctcttttcagggaaagggaaatatagagaacacataggattgctccctgcaaagtatcggtttcgtgaagaagcagctacagttgtg

SEQ ID NO: 1934 - DNA, 984 bp, Triticum aestivum
atgatgaagaaaggyatgcttcctcctgatattaarttcttcmattcaatcatgcagaacctttgcacagaaggaagggtaatagaagcacgggatgtccttggcttgatagcgcacataggtatgaggcctgatgtttgcacatttaatatactgatcggtggatactgcctagtcggcaagatggarsatgcctcaaaaatatttgatgatatgatgtcatatggcttagaaccttctaatattacgtatggtatacttattaatggctattgcaaaaatagaaggattgatgacgggcttattctgttcaaagagatgctgcacaagggacttaaacctacaacttttaattataacgtcatactggatggattatttctggctggacgaactgttgctgcaaaggaaaagtttgatgagatggttgaatctggagtaagtgtgtgcattggtacatattcgacagttcttggtggactttgtagaaataattgtagcggcgaagcaatcacgctattccagaaattaagcacaatggatgtgaaattcaatattataattgtcaatataatgattgatgctttctacaaggttcagcgaaaccaagaagccaaggatttgtttgctgcagtatcagccaatggtttggtagctaatgtctttacctacaccataatgatgaaaaatcttataaaagaagggtcagtggaagaagctgacgatctctttttatcaatggagaagagcggctgtactgctgactcttatatgttaaatcttatcgtcagaatgttactgggaaaaggagagatagtcaaggctgggaattatatatctaaaattgatgcaaagagctactcacttgaagctaaaactgtttcgctgcttatctctctcttttcagggaaagggaaatatagagaacacataggattgctccctgcaaagtatcggtttcgtgaagaagcagccacagttgtg

SEQ ID NO: 1935 - DNA, 2355 bp, Triticum aestivum; identical to SEQ ID NO: 1933

SEQ ID NO: 1936 - DNA, 2376 bp, Triticum aestivum
atgccccgcttctcctccaccacgccaatgtcgccaccccgcctcctcctccgactccgcgcccgccactcctcctccacctctcatccctcacgcatctgggatccccacgccgccttcgccgctgcgacgcagcgggcgcgctctggcacgctcaccacggaggacgcacaccacctgttcgacgaattgctgcggcagggcaatcctgtccaggagcgtcccttgaataactttctggctgccctcgcccgcgcgcccgcgtccgcatcctgcagcggtggccccgccctggccgttgccctcttcggccatttgtcccgaggcgccggacgacgggtggcgcagccaaatgtcttcacctatggcgtcctcatggactgctgctgccgtgcgtgccgcccggatctggcgctcgccttcttcggccgtctcctcaagacgggcctggaggcagaccaagtcgtcttcagcaccctcctgaagggcctttgccacgcaaagcgggcggatgaggctctggacgtgctgcttcacaggatgactgagctgggctgcacccccaacgtggtggcgtataacacggtcatccatggcttctttagggaaggccaagtaggcaaggcgtgcgctctgttccatggaatggcgcagcagggcgttacacctgatgtggtgacatataactcggttattgatccgctgtgcaaggccaaagcaatggacaaggcagagtatttcctttgtcagatggttgataatggtgccgtacctaataatgtgacatataatagcctcatccatggatattcctcttcaggccattcaaaggaggcggtcagggtgctgaaagagatgacaagtaagggtatcataccagatgtttttacttgcaactcgctcatggcctccctttgcaagaatggaagaagcaaagaagctgcagaaatatttgattcaatgtccatgaagggcctgaaacctaacaccgtttcatatgctattcgccttcatgggtatgccaccgaaggatgcttaattgatatgattaatctcttcaattcaatggaaagagactgtattctacctgactgtcatatcttcagcatactgattaatgcatatgctaaatctgggaagcttgataaggctatgcttatattcaaaaaaatgcggaaacaaggagtgagtccaaatgcagtcacatattcaaccgtaatagatgcattttgtaaaaagggtcggttggatgatgctgtgatagagtttaatcagatgattgatacaggagtacgaccgaacacggctgtttattgttccctaatccagggtttctgtacacatggcggtttggtgaaagcaaaggaatatgttactgaaatgatgaacaaaggtatgcttcctcctgatattatgttcttccattcagtaatgcagaacctatgcacagaaggaagggtaatagaagcacgggatatccttggcttgatagcgcacataggtatgacgcctgatgcttgcacatttaatatactgattggtggatactgcctagtctgcaagatggaggattcaacaaacatgtttaatgatatggtgtcatatggtttagaaccttgtaacattacgtatggtatacttattaatggctattgcaaaaatagaaggattgatgaggggctgattctgttcaaagagatgttgcgcaagggacttaaacctacaacttttaattataacgtcatcttggatggattatttctggctggacgaactgttgccgcaaaggaaaagtttaatgagatggttgaatctggagtaagtatgtggatcagtacttactctatagttcttcgtggactttgtagaaataattgtagcggcgaagccatcacgctattccagaaattaagcgcaatggatgtgaaattcaatattagaattgtcaatatcatgattgatgccttcttcagggttcagcgaaagcaagaagctaaggatttgtttgctgcaataacagccaatgggttggttgctgatgtttttacctacagcctaatgatgacaaatcttataaaagaagggtcagtggaagaggctgacacactctttttatcgatggagatgagcggctgtacttcgaactcgtggatgttaaatcttattatcagaaggttgctggaaaaaggagagatagtcaaggctggatgttatatgtctaaagttgatgcgaagagcttctcacttgaagctaaaactgtttcactgctgatctctctcttttcagggaaagggaaatacagagaacacataagattgctacctacaaagtatcagtttctcgaagaagcagccacagttgaatggtttgctaca

SEQ ID NO: 1937 - DNA, 2376 bp, Triticum aestivum; identical to SEQ ID NO: 1936

SEQ ID NO: 1938 - DNA, 2376 bp, Triticum aestivum; identical to SEQ ID NO: 1936

SEQ ID NO: 1939 - DNA, 2376 bp, Triticum aestivum; identical to SEQ ID NO: 1936

SEQ ID NO: 1940 - DNA, 2376 bp, Triticum aestivum; identical to SEQ ID NO: 1936

SEQ ID NO: 1941 - DNA, 2376 bp, Triticum aestivum; identical to SEQ ID NO: 1936

SEQ ID NO: 1942 - DNA, 2313 bp, Triticum aestivum
atgccaaccgcccgcctgtcctccatcttcacctcctccttcagggatccttcacgagcccccctcgccgccttggctgccgccacggaacgcgtgcgcgctggaacgctaacccgggaggacgcgcaccacctgttcggcgaattgctaggccaagccgccgccgtcccggaacgcgggttgaacaactttcttgccacactcgcccgtgctccaccctcacctgcctgcagcgatggccccggccttgccatcgccctcttcaaccgcatgtcccgaggcgctggtgcacgggtggtgtcgcccacgctctgtacctattccatcctcatggactgctgctgccgcgcaggccgcccggacttggtggttgccttcttcggtcgcctcatcaggttggggctgcgcttggaggtcatctccgtcagcaatctcctcaaggggctctgccaggccaagcgtacaaatgaggcggtggccttgctgctccacgggacacctgaactggactgtgtgcctaatgtcttctcgtacagcatcgtaatcaacggctgttttaaagaaggtgaagtagacaaagcgtgcaatctcttccatgggatgatccaactgggagttcaacctaatgtggtcatctacacctcaattatcgatgcactaagcaagtgcagagccatggacaaggcagaagtggtccttcagcaaatggttgatcaaggcattgaacccaacatcaggacatatactaccctgatacatggatattccgcttcgggtcagtggaaggcggcagttagagtattcaaggaaatggcaagtgttggtgttctaccaaatgctgtcactttgaactcatttatggattcactttgcaagcatagaaggacaaaggaagctagagttatttttgactccatggctgcaaagggccaaaaacctgatgtcgtctcctactctactatgcttagcgggtatgcgaaagaaggatgcttcgatgatatgacttgtctcttcaattcgatgctacagaatggtgttgtacctaaccaccatattttcaacatactgatcaatgcatatgctaaacgtggactgatggatgcggctatgcacatgttcgaagtaatgaggcaacaaggagtaaacccagatgtatttagctatcaaattgtaatggattcactttgcaaaatgggtaggatggatgctgctctggacaaatttaatcagatggtcaatcaaggagtttcacctgacatagttgtttaccgatgcctagttctgggttcttgctctcatggtgattttgagaaagccaaggaattgatttctgaagcagttaatagaggtctgtgttctaacagtgtgttcttctatcctgtaataaacgacctgtgcaaagaaggaaaggtgaaggaggcacaggatatgtttgacttcattgtaggtattggtcagcggcctgatgtgattatgtacaattcactgatggatggatattgccttgttggcaaagtggaggaagcactgagagtacttgatgctatgaagtctgttggcctccaacctgatgcttttacgtacggtatacttcttaatggctactgtaaaattggcaagatcgccgatggattgagtcttttcagggaaatgtcactcaacggggttaagcccatgactattatgtacaacattatactccatgggttgtttttctccgggagaacagtttctgcaaaggaaatattccatacgatgaatgcaagtggcataccagtgggcgttgacacatacaacatagttcttagtggactttgtaaaaataattgcactgatgaagcaatagagctgttcaagaaattacgtgctatgaacgtgaagattaatgtcataatactcaataccatgatttctgcaatgtttaaaactaggagaattgaagaagccaaggatttgtttgctactatatcagccattgggttggtgccttctgttgtgacttacagtgtaatgatgacgaatttcataaaagaagggttgttggcagaggctgatgatatgtttttagcaatggagaaggctagctgtgctcccaactccagtctgctaaatcaagtggtcagggcgttgctggaaaaaggtgcagttgtaaaggctgcaacttatctcgctaaacttgatgctaaacagctgtcagttgaagcttcaacgatttcgttaatagtatctctcttctcaggggaagggaaactaagggagcacgtagagttgcttccagtaaagtaccagcctcctgagagttcggctgacaat

SEQ ID NO: 1943 - DNA, 2313 bp, Triticum aestivum; identical to SEQ ID NO: 1942

SEQ ID NO: 1944 - DNA, 1002 bp, Triticum aestivum
atgccaaccgcccgcctgtcctccatcttcacctcctccttcagggatccttcacgagcccccctcgccgccttggctgccgccacggaacgcgtgcgcgctggaacgctaacccgggaggacgcgcaccacctgttcggcgaattgctaggccaagccgccgccgtcccggaacgcgggttgaacaactttcttgccacactcgcccgtgctccaccctcacctgcctgcagcgatggccccggccttgccatcgccctcttcaaccgcatgtcccgaggcgctggtgcacgggtggtgtcgcccacgctctgtacctattccatcctcatggactgctgctgccgcgcaggccgccaggacttggtggttgccttcttcggtcgcctcatcaggttggggctgcgcttggaggtcatctccttcagcaatctcctcaaggggctctgccaggccaagcgtacaaatgaggcggtggccttgctgctccacgggacacctgaactggactgtgtgcctaatgtcttctcgtacaacatcataatcaacggctgttttaaagaaggtgaagtagacaaagcgtgcaatctcttccatgggatgatccaactgggagttcaacctaatgtggtcatctacacctcaattatcgatgcactaagcaagtgcagagccatggacaaggcagaagtggtccttcagcaaatggttgatcaaggcattgaacccaacatcaggacatatactaccttgatacatggatattccgcttcgggtcagtggaaggcggcagttagagtattcaaggaaatggcaagtgttggtgttctaccaaatgctgtcactttgaactcatttatggattcactttgcaagcatatagaaggacaaaggaagctagagttatttttgactccatggctgcaaagggccaaaaacctgatgtcgtctcctactctactatgcttagcgggtatgcgaaagaaggatgcttcgatgata

SEQ ID NO: 1945 - DNA, 2313 bp, Triticum aestivum; identical to SEQ ID NO: 1942

SEQ ID NO: 1946 - DNA, 1083 bp, Triticum aestivum
atggtcaatcaaggagtttcacctgacatagttgtttaccgatgcctagttctgggttcttgctctcatggtgattttgagaaagccaaggaattgatttctgaagcagttaatagaggtctgtgttctaacagtgtgttcttctatcctgtaataaacgacctgtgcaaagaaggaaaggtgaaggaggcacaggatatgtttgacttcattgtaggtattggtcagcggcctgatgtgattatgtacaattcactgatggatggatattgccttgttggcaaagtggaggaagcactgagagtacttgatgctatgaagtctgctggcctccaacctgatgcttttacgtacggtatacttcttaatggctactgtaaaattggcaagatcgccgatggattgagtcttttcagggaaatgtcactcaacggggttaagcccacgactattatgtacaacattatactccatgggttgtttttctccgggagaacagtttctgcaaaggaaatattccatacgatgaatgcaagtggcataccagtgggcgttgacacatacaacatagttcttagtggactttgtaaaaataattgcactgatgaagcaatagagctgttcaagaaattacgtgctatgaacgtgaagattaatgtcatagtactcaataccatgatttctgcaatgtttaaaactaggagaattgaagaagccaaggatttgtttgctactatatcagccattgggttggtgccttctgttgtgacttacagtgtaatgatgacgaatttcataaaagaagggttgttggcagaggctgatgatatgtttttagcaatggagaaggctagctgtgctcccaactccagtctgctaaatcaagtggtcagggcgttgctggaaaaaggtgcagttgtaaaggctgcaacttatctcgctaaacttgatgctaaacagctgtcagttgaagcttcaacgatttcgttaatagtatctctcttctcaggggaagggaaactaagggagcacgtagagttgcttccagtaaagtaccagcctcctgagagttcggctgacaat

SEQ ID NO: 1947 - DNA, 2313 bp, Triticum aestivum; identical to SEQ ID NO: 1942

SEQ ID NO: 1948 - DNA, 2313 bp, Triticum aestivum
atgccaaccgcccgcctgtcctccatcttcacctcctccttcagggatccttcacgagcccccctcgccgccttggctgccgccacggaacgcgtgcgcgctggaacgctaacccgggaggacgcgcaccacctgttcggcgaattgctaggccaagccgccgccgtcccggaacgcgggttgaacaactttcttgccacactcgcccgtgctccaccctcacctgcctgcagcgatggccccggccttgccatcgccctcttcaaccgcatgtcccgaggcgctggtgcacgggtggtgtcgcccacgctctgtacctattccatcctcatggactgctgctgccgcgcaggccgcccggacttggtggttgccttcttcggtcgcctcatcaggttggggctgcgcttggaggtcatctccgtcagcaatctcctcaaggggctctgccaggccaagcgtacaaatgaggcggtggccttgctgctccacgggacacctgaactggactgtgtgcctaatgtcttctcgtacagcatcgtaatcaacggctgttttaaagaaggtgaagtagacaaagcgtgcaatctcttccatgggatgatccaactgggagttcaacctaatgtggtcatctacacctcaattatcgatgcactaagcaagtgcagagccatggacaaggcagaagtggtccttcagcaaatggttgatcaaggcattgaacccaacatcaggacatatactaccctgatacatggatattccgcttcgggtcagtggaaggcggcagttagagtattcaaggaaatggcaagtgttggtgttctaccaaatgctgtcactttgaactcatttatggattcactttgcaagcatagaaggacaaaggaagctagagttatttttgactccatggctgcaaagggccaaaaacctgatgtcgtctcctactctactatgcttagcgggtatgcgaaagaaggatgcttcgatgatatgacttgtctcttcaattcgatgctacagaatggtgttgtacctaaccaccatattttcaacatactgatcaatgcatatgctaaacgtggactgatggatgcggctatgcacatgttcgaagtaatgaggcaacaaggagtaaacccagatgtatttagctatcaaattgtaatggattcactttgcaaaatgggtaggatggatgctgctctggacaaatttaatcagatggtcaatcaaggagtttcacctgacatagttgtttaccgatgcctagttctgggttcttgctctcatggtgattttgagaaagccaaggaattgatttctgaagcagttaatagaggtctgtgttctaacagtgtgttcttctatcctgtaataaacgacctgtgcaaagaaggaaaggtgaaggaggcacaggatatgtttgacttcattgtaggtattggtcagcggcctgatgtgattatgtacaattcactgatggatggatattgccttgttggcaaagtggaggaagcactgagaatacttgatgctatgaagtctgttggcctccaacctgatgcttttacgtacggtatacttcttaatggctactgtaaaattggcaagatcgccgatggattgagtcttttcagggaaatgtcactcaacggggttaagcccatgactattatgtacaacattatactccatgggttgtttttctccgggagaacagtttctgcaaaggaaatattccatacgatgaatgcaagtggcataccagtgggcgttgacacatacaacatagttcttagtggactttgtaaaaataattgcactgatgaagcaatagagctgttcaagaaattacgtgctatgaacgtgaagattaatgtcataatactcaataccatgatttctgcaatgtttaaaactaggagaattgaagaagccaaggatttgtttgctactatatcagccattgggttggtgccttctgttgtgacttacagtgtaatgatgacgaatttcataaaagaagggttgttggcagaggctgatgatatgtttttagcaatggagaaggctagctgtgctcccaactccagtctgctaaatcaagtggtcagggcgttgctggaaaaaggtgcagttgtaaaggctgcaacttatctcgctaaacttgatgctaaacagctgtcagttgaagcttcaacgatttcgttaatagtatctctcttctcaggggaagggaaactaagggagcacgtagagttgcttccagtaaagtaccagcctcctgagagttcggctgacaat

SEQ ID NO: 1949 - DNA, 2313 bp, Triticum aestivum; identical to SEQ ID NO: 1942

SEQ ID NO: 1950 - DNA, 2262 bp, Triticum aestivum
atgcctcgcttctcctccaccccgccaatgtcgccacgccgcctccgcgtcggactcggcgcccgccactcctcctccacctcccatccctcacgcagctgggagccccacgccgccttcgccgccgccacggagcgtgcgcgatctggcaacctcaccccggaggacgcacaccaccggttcgacgaattgctccggcaggccaatcctgtccaggagcgccccttgaacaaacgtctctccgccctcgccggtgctccggcgtccgcggcctgcagaaacggccctgcactcgcggtcgccctcttcagccgcatatcccaaggtgcccgccgacgtgtggcgcacccaacggcctgcacctacggcatcctcatggactgctgctgccgcgcacaccgcctcgatctggcgttcgctttcttcggccgtctcctcaggacgggacttaaggcaggcgtcattcaagtttgcactcttctcaagggcctctgccgcgcaaagcgggctgatgaggctctcgacgtgctgcttcacaggatgcctgagctggggggctgcacccccaacgtggtggcgtataccacggtcatccacagcttctttaaggaaggccaagtaagcaaggcatgcaatctattccatgaaatggcgctgcagggcgttacacctgatgtggtgacatatagctcggttattgatgcgctgtgcaaggccagagccatggacaaggcagagtatttccttcgtcagatggttcataatggtgtcctacctaataatgtgacatataatagcctcatccatggatattcctcttcaggccattggaaggaggcggttagggtgctgaaagaaatgacaagtcaaggtatcatacctgatatcatttcataccgtattctgcttcatgggtatgccaccgaagggtgcttagttgatatgattaatctcttcaattcaatggcaagatactgtattctacctgattgtcatatcttcaacatactgattaatgcatatgctaaatctgggaagcttgataaggctatgcttatatttaaagaaatgcagaaacaaggagtgagtccagatgcagtcacatattcaaccgtaatacatgcattttgcaaaaatggcaggttggacgatgctgtgataaagtttaatcaaatgattgatacaggagtacaaccgaacacatctgtttataatgccctaatccaggggttttctacaaatggcgatttggtgaaggcaaaggaattggttacggaaatgatgaacaaaggtatgcatcctcctgatattaaggtcttccattcggtaatgcagaacctatgcacagaaggaagggtaacagaagcacgggatatccttgacttgatagtgcacataggtatgaggcctgatgttttcacatttacttcactgagcggtggatactgcctagtccgcaacatggaggatgcatcaaaaatatttgatgatatggtgtcatatggtttagaaccttctaacatcacgtatggtatacttattaatggctattgcaaaaacaaaaggattgatgaggggctgattctgttcaaagaaatgttgcgcaagggacttaaacctacaactattaattacaatgtcatattggatggattatttctggctggacgaactgttgctgcaaaggaaaagtttaatgagatggttgaatctggagtaagtgtgtgcattgatacatattcgatagttcttggtggactttgcacaaataactgttgcggcgaagccatcacgctattccagaaattaagcaaaatgaatgtgaaattcaatattagaattgtcaatatcatgattgatgccttcttcaaggttcagcgaaagcaagaagctgaggatttgtttgctgcaatatcagcaaatgggttggttgctaatgtttttacctacagcctaatgatgacaaatcttataaaagaagggtcagcggaagaagctgacactctctttttatcgatggagaagagcggctgtactgccaactcgtggatgttaaatcttattatcagaaggctactggaaaaaggagagatagtgaaggctggaaattatatggctaaagtcgatgcaaagagctactcacttgaagctaaaactgtttcgctgctgatttctctcttttcagggaaagggaaatacagagaacacataagattgctgcctacaaagtatcagtttcgtgaagaagcagccatagttgaa

SEQ ID NO: 1951 - DNA, 2370 bp, Triticum aestivum
atgatctcccactcgtcgtcttcccagagttcacgacctactcactgtaaaaaacaatgctactgtacccgtcgtctcccactcgtcttgctcccacttcacaccaaggccatgcctcgcctctcctccaccacgcccatgtcgccactccgcctccgcctccgcctccgcgcccgccactccgcctccacctcccattcctcacgcagctgggagccccacgccgccttcgccgccgccacggagcgtgcgcgctctggcaaactcaccccggaggacgcacaccacctgttcgacgaattgctgcggcaggccaaacctgtccaggagcgcccccttaacaaccttcttgccgccctagctcgtgctccggcgtccgcggcgtgcagcgatggccctgcactcgcagtcaacctcttcggccgcatatcccaaggcgcctgccgacgtgtggcgcacccaacggcctgcacctacggcatcctcatggactgctgctgccgtgcacaccgcctcgatctggcgttcgctttcttcggccgtctcctcaggacgggacttaaggcaggcgtcattcaagtttgcactcttctcaagggcctctgccgcgcaaagcgggctgatgaggctctggacatgctgcttcacaggatgcctgagctgggctgcacccccaacgtggtggcatataccacggtcatccacggcttctttaaggaaggccaagtaagcaaggcatgcaatctattccatgaaatggcgctgcagggcgttacacctgatgtggtgacatatagctcggttattgatgcactgtgcaaggccagagccatggacaaggcagagtatttccttcgtcagatggttcataatggtgtcctacctaataatgtgacatataatagcctcatccatggatattcctcttcaggccattggaaggaggccgttagggtgctgaaagaaatgacaagtcaaggtatcatacctgatatcgtttcataccgtattctgcttcatgggtatgccaccgaagggtgcttagttgatatgattaatctcttcaattcaatggcaagatactgtattctacctgattgtcatatcttcaacatactgattaatgcatatgctaaatctgggaagcttgataaggctatgcttatatttaaagaaatgcagaaacaaggagtgagtccagatgcagtcacatattcaaccgtaatacatgcattttgcaaaaagggtaggttggatgatgctgtgataaagtttaatcaaatgattgatacaggagtacaaccgaaaacatctgtttataatgccctaatccaggggttttctacaaatggcgatttggtgaaggcaaaggaattggttatggaaatgatgaacaaaggtatgcatcctcctgatattaaggtcttccattcggtaatgcagaacctatgcacagaaggaagggtaacagaagcacgggatatccttgacttgatagtgcacataggtatgaggcctgatgttttcacatttactttactgatcggtggatactgcctagtccgcaacatggaggatgcatcaaaaatatttgatgatatggtgtcatatggtttagaaccttctaacatcacgtatggtatacttattaatggctattgcaaaaacaaaaggattgatgaggggctgattctgttcaaagaaatgttgcgcaagggacttaaacctacaactattaattacaatgtcatattggatggattatttctggctggacgaactgttgctgcaaaggaaaagtttaatgagatggttgaatctggagtaagcgtgtgcattgatacatattcgatagttcttggtggactttgcacaaataactgttgcggcgaagccatcacgctattccagaaattaagcaaaatgaatgtgaaattcaatattagaattgtcaatatcatgattgatgccttcttcaaggttcagcgaaagcaagaagctgaggatttgtttgctgcaatatcagcaaatgggttggttgctaatgtttttacctacagcctaatgatgacaaatcttataaaagaagggtcagcggaagaagctgacactctctttttatcgatggagaagagcggctgtactgccaactcgtggatgttaaatcttattatcagaaggctactgaaaaaaggagagatagtgaaggctggaaattatatggctaaagtcgatgcaaagagctactcacttgaagctaaaactgtttcgctgctgatttctctcttttcagggaaagggaaatacagagaacacataagattgctgcctacaaagtatcagtttcgtgaagaagcagccatagttgaa

SEQ ID NO: 1952 - DNA, 1290 bp, Triticum aestivum
atgaaaagcaacggtattgcagccgactgccgtgttttcaccatattaattgatgcatatgctaaacgcggaatgatggatgatgcaatgcacatatttgcggaaatgcgggaaaaaggagtgagtcccaatgtagtcacctatgccactgtaataggcgcactttgcagattgggtaggctggccgatgctatggacaggttcaatgagatgactgatatgggtgtacagccgaacacagctgtttatcactccctaattcagggtttttgtatgcatggtgatttgggtaaagccaaggagttagtttctgacatgataagcaaaggtattcctcgtcccaacattgtgttcttcaattcagttataaactatttgtgcaaagaaggaaggattatggatgcacaagatatctttgaattggttataatcatagatgggaagcctgatgtcattacatttaactcactgattgacggacattgcttagtcagcaagatggataaagcatttggagtacttggtgccatgttgtcagctggcattgagcctaatgttgttacatataatacacttgttaatggctattctagaaatggaaggatcgatgatggtttgactctgttcagacaaatgccacgtaagagaataaaacctgacagtgccacatatgggatcatactggatgggttgtttcgtgctgggagaactgttgctgcaaggaaaatgttccatgatatgatcgaaagcggaataacagtgagcatttccacatacaatattatacttgcaggtctttctagaaacaattgtgcagaagaagcgatcgacctgtaccagaaattagttgcaatgaatgtgaagttcaatatttcaataatcaataccatgatcaatgcaatgtacaaggttaaaagaaaagaggaagctaaagatttgtttgctgctatatcagcgagtgggttggttcctaatgcttcgacttatggagtaatgataataaatattctaaaagatggagcagtggaagatgctaacaatatgttctcagcaatggacaggaatggtatagctccctgctctcgtcttatagatagtattatcagaattttgctggaaaaaggtgagatcaccatggccggactttatttgttgaaacttgacgggaagaacatgctacttgaagcttcaactacttcactgatgttgtctctcttttcaaggaaagggaaatataaggaggatgtgaaatttctccctgcaaagtatcagttttttgatggatttggt

SEQ ID NO: 1953 - DNA, 1290 bp, Triticum aestivum; identical to SEQ ID NO: 1952

SEQ ID NO: 1954 - DNA, 2340 bp, Triticum aestivum
atgtcccgcctccgcctccgccgctcctccaccacgccgatgttccacatcctccgccgcagctcctcctctacctccatctcgcccccctcacgttcctggtctcccgaaggcgcctttgccgcggccacggcgcgtctcagcactggaacgctcagccctgaagaagcacaccacctgttcgacgaattgctgcggcaggccaccccggtccccagccgctccctgaacggcttccttgccacccttgcccgtgcgcctgcctccgcggcctgcagcagagatggccctgccctcgccctcgccctcgctctcttcaaccgcgtgtgcgcagaagaagccgacccgcgggtggcgcctctcacagtccacacctacggcatcctcatggactgctgctgccgcgcgcgtcgcccggacctggggcttgccttattcgcacgcttcctcaggacaggcctcaagacaaatgagatcatcgctaacaccttcctcaagtgcctctgctatgccaaacgtacagatgaggctatcaacttgctgcttcataggatgcccgagcttggctgcgtgcctgatgcaatctcatacaccattgttctgaagagcttatgcgagaatagcatgagtcagcgggcactcgacctgctccagatggtggcagaaggaggaggtgcctgctccctcaatgtggtggcgtatagcacagtcatccatggcttcttcaaggagggcgaaacaggcaaggcatgcaatctattccatgaaatgacccgtcaaggggttgtgcccaatgtggtcacgtatagctcgattattgatgcgttgtgcaagtccagagcaatggacaaggcagagctagtccttcaacagatggttgatagtggtgctcaaccgaataatgtgacatataattgcatgatccatggatattccacatcagggcagttgaaagaggctgctaaaatgtttagaaaaatgacaagccatggtcttgtaccaaatgcagtcacttgcagctcgttaatgacttccctttgcaagcatggaagaagcaaagaagcggcggaaatattttattccatgactgccaagggccacaaaccggatgccgtctcgtaccgtattttgcttcatgggtatgccaatgaaggatgctttgctgatatgattgatctctttaattcaatgaaaagcaacggtattgcagccgactgccgtgttttcaccatattaattgatgcatatgctaaacgcggaatgatggatgatgcaatgcacatatttgcggaaatgcgggaaaaaggagtgagtcccaatgtagtcacctatgccactgtaatagccgcactttgcagattgggtaggctggccgatgctatggacaggttcaatgagatgactgatatgggtgtacagccgaacacagctgtttatcactccctaattcagggtttttgtatgcatggtgatttgggtaaagccaaggagttagtttctgacatgataagcaaaggtattcctcgtcccaacattgtgttcttcaattcagttataaactatttgtgcaaagaaggaaggattatggatgcacaagatatctttgaattggttataatcatagatgggaagcctgatgtcattacatttaactcactgattgacggacattgcttagtcggcaagatggataaagcatttggagtacttgatgccatgttgtcagctggcattgagcctaatgttgttacatataatacacttgttaatggctattctagaaatggaaggatcgatgatggtttgactctgttcagacaaatgccacgtaagagaataaaacctgacagtgccacatatgggatcatactggatgggttgtttcgtgctgggagaactgttgctgcaaggaaaatgttccatgatatgatcgaaagcggaataacagtgagcatttccacatacaatattatacttgcaggtctttctagaaacaattgtgcagaagaagcgatcgacctgtaccagaaattagttgcaatgaatgtgaagttcaatatttcaataatcaataccatgatcaatgcaatgtacaaggttaaaagaaaagaggaagctaaagatttgtttgctgctatatcagcgagtgggttggttcctaatgcttcgacttatggagtaatgataataaatattctaaaagatggagcagtggaagatgctaacaatatgttctcagcaatggacaggaatggtatagctccctgctctcgtcttataaatagtattatcagaattttgctcaaaaaggtgagatcaccatggccggactttatttgt

SEQ ID NO: 1955 - DNA, 2340 bp, Triticum aestivum; identical to SEQ ID NO: 1954

SEQ ID NO: 1956 - DNA, 2340 bp, Triticum aestivum; identical to SEQ ID NO: 1954

SEQ ID NO: 1957 - DNA, 1290 bp, Triticum aestivum
atgaaaagcaacggtattgcagccgactgccgtgttttcaccatattaattgatgcatatgctaaacgcggaatgatggatgatgcaatgcacatatttgcggaaatgcgggaaaaaggagtgagtcccaatgtagtcacctatgccactgtaataggcgcactttgcagattgggtaggctggccgatgctatggacaggttcaatgagatgactgatatgggtgtacagccgaacacagctgtttatcactccctaattcagggtttttgtatgcatggtgatttgggtaaagccaaggagttagtttctgacatgataagcaaaggtattcctcgtcccaacattgtgttcttcaattcagttataaactatttgtgcaaagaaggaaggattatggatgcacaagatatctttgaattggttataatcatagatgggaagcctgatgtcattacatttaactcactgattgacggacattgcttagtcagcaagatggataaagcatttggagtacttggtgccatgttgtcagctggcattgagcctaatgttgttacatataatacacttgttaatggctattgtagaaatggaaggatcgatgatggtttgactctgttcagacaaatgccacgtaagagaataaaacctgacagtgccacatatgggatcatactggatgggttgtttcgtgctgggagaactgttgctgcaaggaaaatgttccatgatatgatcgaaagcggaataacagtgagcatttccacatacaatattatacttgcaggtctttctagaaacaattgtgcagaagaagcgatcgacctgtaccagaaattagttgcaatgaatgtgaagttcaatatttcaataatcaataccatgatcaatgcaatgtacaaggttaaaagaaaagaggaagctaaagatttgtttgctgctatatcagcgagtgggttggttcctaatgcttcgacttatggagtaatgataataaatattctaaaagatggagcagtggaagatgctaacaatatgttctcagcaatggacaggaatggtatagctccctgctctcgtcttatagatagtattatcagaattttgctggaaaaaggtgagatcaccatggccggactttatttgttgaaacttgacgggaagaacatgctacttgaagcttcaactacttcactgatgttgtctctcttttcaaggaaagggaaatataaggaggatgtgaaatttctccctgcaaagtatcagttttttgatggatttggt

SEQ ID NO: 1958 - DNA, 2340 bp, Triticum aestivum
atgcagaccggccgcctgtcctccatcttcaccagcaacgcaacctcctccttcagggctccttcgccacaaccacgacccccccttgccgccttggctgccgccacagagcgtgcgcgcgccggaacgctaagaccggaggaggctcaccacctgttcgacgaattgctgagccaagccgcccctgtcccagaacgcgggctgaacaacttttttgctgcactcgcccgtgctccgccctcagctgcgtgcggcgatggccctgcccttgccatcgctctcttcaaccgcatgtcccgaggcgtgggtccatggatggcatcgcccgctggctgtacctattccatcctcatggactgttgctgccgcgcaggacgcccggacttggtggttgccttcttcggccgcctcctcaggttgggcctgcgcttggaggtcatctccttcaacaacctcctcaaggggctctgccatgcccagcgtacaaatgaggctttggacgtgctgctccaccgcacacccgaactagactgtgtgcctgacgtcttctcctacagcatagtaatcaacagctgctttaaagaaggtgaagtagacaaagcgtgcaatctcttccatgagatgatccaactgggagttcaacctgatgtggccatctacacctcaattatcgacgcactaagcaaggctggagccatggacaaggcagaagtggtccttcagcagatggttgatcaaggaattgaacccgatgtcatgacatatactagcctgatacatggatattccggttcgggtcagtggaaggcggcagttagagtattcaaggaaatggcaagtgctggtgttctaccaaatgccttcactttgaactcatttatggattcactttgcaagcatagaaggacaaaggaagctagagttatttttgactcaatggctgcaaagggccaaaaactaaatatcgtctcctactctattatgcttaacgggtatgcgaaagaaggatgctttgatgatatgactggtctcttgaatttgatgctacagaatggtgttgtacctaaccaccatattttcaacatactgatcaatgcatatgctaaacgtggactgatggatgaggctatgcacatgttcgaagtaatgaggcaacaaggagtaaacccggatgtagttgactatctagtaataatggattcactttgtaaaatgggtaggatggatgctgctctggacaaatttaatcagatggtcaatcaaggagtttcacctaacaaagctatttaccaatgcctggttctgggttcttgctctcatggtcattttgtgaaagccaaggaattgatttctgaagcaattaatagaggtctgttttctaacagtgtgttcttctatcctgtaataaacgacctgtgcaaagaaggaaaggtgaaggaggcacaggatatgtttgacttcattctaggtattggtcagcggcctgatgtgattatgtacaattcactgatggatggatattgccttgttggcaaggtggaggaagcagtgagagtacttgatgctatgaagtctgctggcctccaacctactgccgttacgtatgctatacttcttaatggctactgtaaaattggcaggatcgccgatggattgagtcttttcagggaaatgtcactcagcggggttaagcccacgactattatgtacaacattatacttgatgggctgtttcgctccgggagaacagtttctgcaaaggaaaaattccgtacgatgagcgaaagtggcataccagtgggcattggcacatacaacataattcttcatggattttgtagaagcaattgcactgatgaagcaatagagttgttcaagaaattatgtgcaatgaacgtgaagattgatgtcataacactcaataccatgatttctgtaatgtttaaaactaggagaattgaagaagccaaggatttgtttgctactatatcagccatcggattggtgccttctgttgtgacttacagtgtaatgatgacgaatttcataaaagaagggttgctggcagaggctgatgatatgtttttagcaatggagaaggctggctgtgctcctgactgcaggctgctaaatcatgtagtcagggtgttgctggaaaaaggtgcagttgtaaaggctgcaacttatctcgctaaacttgatgcgaaagagctgtcacttgaagcttcaacggtttcgttaatagtatctctcttctcaaggagaggcaaattaagggagcacgtaaaattgcttccagtaaagtaccagcctcctgagatattacttggaacttcctac

SEQ ID NO: 1959 - DNA, 2283 bp, Triticum aestivum
atgcctcgcttctcttccaccacgtcaatgtcgtcactccgcctccgcctccgcctccgcctgcacgcctgccactcctcctcggcctcgcaaccctcacgcagccagggatgggatccccacgccgccttcgccgtcgccacggagtgtgcgcgctccggcaacctcaccccggagggcgcacataacctgttcgacgaattgctgcggcagggcaatcctgtcctggggcgccccctcaacaaccttctcgccgccctcgcccgtgcgccggcgtccagctcctgcagagatggccctgcactcgcggtcgccctcttcagccgcatatcccaaggcgcccgcctaagggtggtgcacccaacggcctgcacctacagcatcctcatggactgctgctgccgcgcgcgccacctggatctggcactcgccttcttcggccgtctcctcaggactgggctgaaggcaggcgccatagaagtcaacattcttctcaagagcctctgccatgcaaagcgggcagatgaggccatggaagtgcttcttcacaggatgcctgagctgggttgcacccctgactcggtggcgtataacacggtcatccacgggttctttaaggaaggccaagtaggcagagcaatggacaaggcggagtatttccttcgtgaaatggttgataatggtgtcatacctaataatgtgacatataatagcctcatccatggatattcctcttcaggctatcagaaggaggcggttagggtgctgaaagaaatgacaagtcagggtatcataccagatgtttttacttgcaactcgctcatggcctccctttccaagaatggaagaagcaaagaagctgcagaaatttatgactccatggccatgaagggcctggaacctgatatcgtctcgtataatactcggcttcacgggtatgccaccgaaggatgcttagttgatatgactaatctctttaattcaatgactagagatggtattcggcctaactgtcacactttgaacatattgattaatgcatatgctaaatttggcatgatggatgaggctatgcttatatttaaaggaatgcggaaacagggagtgagtccagatgtagtcacctattcaaccgtaatacatgcattttgcaaaatgggtagcttggacattgctatggacaaatttaagcagatgactgatatgggagtacgaccgaatccaattgtttatcattccctaatccagggtttttgtacacatggggatttagtgaaagcaaaggagttggttactgaaatgaggaacaaaggtatgcgtcctcctgatattaaggtcttccatttggtgatgcagaacctatgcacggaaggaagggtaacaaaagcacgggatatccttgacttgatagtgcgcattggtatgaggcctgatgttttcatatttaatatactgatcggtggatactgcctagtccgcaagatggcagatgcatcaaaaatatttgatgatatggtgtcatatggtttagaaccttctaatattacatatggtatacttattaatggctattgcaaaaacaaaaggattgatgatgggctgattctattcaaaacaatgttgcacaagggacttaaacctacaacttttaattataacgtcatactggatggattatttctggctggacgaacagttgctgcaaaagagaagtttaatgagatggttgaatctggagtaagtgtgtgcattgatacatgctctatagttcttggtggactttgtaaaaataactgcagcagcgaagcgatcaccctgttacggaaattaagcacaatgaatgtgaaatttgatattacaattgtcaatatcattattggtgcattctacagggtcaagagaaaccaagaggctaaggatttgtttgctgctataccagccaatggcttggttcctaatgctgttacctacaccataatgatgacaaatcttataaaagaaggttcagtggaagaagccgacaatctttttttatcaatggagaagagcggctctactgcaaactcttggatgttaaatcatattatcagaaggttactggaaagaggagagatagtcaaggctggaaattatatgtctaaagttgatgtaaagagctactcacttgaagctaaaactgtttcactgctgatctctctgttttcaagggaagggaaatatagagaccacatcaaattgctccctacaaagtatcagtttctggaagaagcagccacagttgaa

SEQ ID NO: 1960 - DNA, 1089 bp, Triticum aestivum
atggttgatatgggagtacgaccgaatgcaattgtttatcattccctaatccggggtttttgtacacatggggatttagtgaaagcaaaggaattggttactgaaatgaggaacaaagctatgcgtcctcctcatattaagttcttccattcaataatgcagaacctatgcacggaaggaagggtaatagaagcacgggatatcctcgacttgatgctgcacataggtatgaggcctgatgttcccatctttaatttactaatcggtggatattgcctagtccgcgagatggaggatgcaacaaaaatgtttgatgatatggtgtcatatggtttagaaccttgtaacaatacgtatggtatacttattaatggctattgcaaaaatagaaggattgatgacgggcttattctattcaaagagatgctgcgcaagggacttaaacctacaacttttaattataacgtcatactggatggattatttctggctggacgaactgttgctgcaaaggtgaagtttaatgagatggttgaatctggagtaagtgtgtgcattgatacatactctatagttcttggtggactttgtagaaataattgcaccggtgaagcaatcacgctgtccaagaaattaagtacaatgaatgtcaaattcaatattgcaattgtcaatatcttgattggtgcattcttcagggttcggcgaaaccaagaagctaaggatttgtttgctgctataccagccaatggcttggttcctaatgctgttacctacaccataatgatgacaaatcttataaaagaaggttcagtggaagaagctgacactctctttttatcaatggagaagagcgggtgtactgccaactcttgtatgttaaatcatattatcagaaggttactggaaagaggagagatagtcaaggctggaaattatatgtcgaaagttgatgcaaagagctactcacttgaagctaaaactgtttcgctgctgatctccctcttgtcagggaaagggaaatatagagaacacataaaattgctccctatgaagtatcagtttctcgaagaagcagccacagttgaa

SEQ ID NO: 1961 - DNA, 2277 bp, Triticum aestivum
atgaatatccggactactagactacactacatccccactcgtcttgctccagagttcacggcctactcaccaaggcccatgcctggcttctcctatgccgcgtcaatgtcgccactccgcctccgcctgcacgcccgccactccgcctccgcctcgcaaccctcacgcagccagggatgggatccccacgccgccttggccgtcgccacggttgccctcttcagccgcatatcccaaggcgccctccgacgtgtggcacatccaacggcttgcacctacagcatcctcatggactgctgctgccgcgcacaccgccctgatatggcactcgccttcttcggtcgtctcctcaggacgggtctggaggcagaccaagtcgttttcagcaccctcctcaagggactctgccacgcaaagcgctcagatgaggctctggacgtgctgctgcacaggatgcctgagctcggctgcaccacccacgtggtggcgtataacaccgtcatccatggcttctttagggaaggccaagtaggcaaggcgtgcgatatcttccatggaatggcgcagcagggcgttgcgcctaatgtggtgacatataactcggttattgatgcgctgtgcaaggccagagcaatggacaaggcagagtatttccttggtcagatggttgatagtggtgtcgtacctaataatgtcacatataatagcctcatccatggatattcctcttcaggccattcaaaggaggcggtcagggtgctgaaacagatgacaagtaagggtatcataccagatgtttttacttgcaacttgctcatggcctccctttgcaacaacagaagaagcaaagaagctgcagaactttttgactccatggccatgaagggcctgaaacctaacaccgtttcatatgctattctccttcataggtatgccactgaaggatgcctagttgacatgatcaatctcttcaactcaatggcaacagactgtattctacctaactgtcgtatcttcaacatactgattaatgcatatgctaaatctgggaagcttgataaggctatgcttatatttaaagaaatgcacaagcgaggagtgagtccagatgtagtcacctattcaactgtaatacatgcattttgcaaaatgggtagcttggacattgctatggacaaatttaaccagatggttgatatgggagtacgaccgaatgcaactgtttatcattccctaatccagggtttttgtacacatggggatttagtgaaagcaaaggaattggttactgaaatgaggaacaaagctatgcgtcctcctgatattaagttcttccattcaataatgcagaacctatgcacggaaggaagggtaattgaagcacgggatatcctcgacttgatgctgcacataggtatgaggcctgatgttcccatctttaatttactaatcggtggatactgcctagtccgcgagatggaggatgcaacaaaaatgtttgatgatatggtgtcatatggtttagaaccttgtaacaatacgtatggtatacttattaatggctattgcaaaaatagaaggattgatgacgggcttattctattcaaagagatgctgcgcaagggacttaaacctacaacttttaattataacgtcatactggatggattatttctggctggacgaactgttgctgcaaaggtgaagtttaatgagatggttgaatctggagtaagtgtgtgcattgatacatactctatagttcttggtggactttgtagaaataattgcaccggtgaagcaatcacgctgtccaagaaattaagtacaatgaatgtcaaattcaatattgcaattgtcaatatcttgattggtgcattcttcagggttcggcgaaaccaagaagctaaggatttgtttgctgctataccagccaatggcttggttcctaatgctgttacctacaccataatgatgacaaatcttataaaagaaggttcagtggaagaagctgacaatctttttttatcgatggagaagagcggctgtagtgccaactcttatatgttaaatcatatcatcagaaggttactggaaaaaggagagatggtcaaggctggaaattatatgtctaaagttgatgcaaagagctactcccttgaagctaaaactgtttcactgctgatctctctgttttcaaggaaagggaaatatagagaacacatcaaattgctccctacaaagtatcagtttctggaagaagcagccacagttgaa

SEQ ID NO: 1962 - DNA, 1089 bp, Triticum aestivum; identical to SEQ ID NO: 1960

SEQ ID NO: 1963 - DNA, 2277 bp, Triticum aestivum
atgaatatccggactactagactacactacatccccactcgtcttgctccagagttcacggcctactcaccaaggcccatgcctggcttctcctatgccgcgtcaatgtcgccactccgcctccgcctgcacgcccgccactccgcctccgcctcgcaaccctcacgcagccagggatgggatccccacgccgccttggccgtcgccacggttgccctcttcagccgcatatcccaaggcgccctccgacgtgtggcacatccaacggcttgcacctacagcatcctcatggactgctgctgccgcgcacaccgccctgatatggcactcgccttcttcggtcgtctcctcaggacgggtctggaggcagaccaagtcgttttcagcaccctcctcaagggactctgccacgcaaagcgctcagatgaggctctggacgtgctgctgcacaggatgcctgagctcggctgcaccacccacgtggtggcgtataacaccgtcatccatggcttctttagggaaggccaagtaggcaaggcgtgcgatatcttccatggaatggcgcagcagggcgttgcgcctaatgtggtgacatataactcggttattgatgcgctgtgcaaggccagagcaatggacaaggcagagtatttccttggtcagatggttgatagtggtgtcgtacctaataatgtcacatataatagcctcatccatggatattcctcttcaggccattcaaaggaggcggtcagggtgctgaaacagatgacaagtaagggtatcataccagatgtttttacttgcaacttgctcatggcctccctttgcaacaacagaagaagcaaagaagctgcagaactttttgactccatggccatgaagggcctgaaacctaacaccgtttcatatgctattctccttcatgggtatgccactgaaggatgcctagttgacatgatcaatctcttcaactcaatggcaacagactgtattctacctaactgtcgtatcttcaacatactgattaatgcatatgctaaatctgggaagcttgataaggctatgcttatatttaaagaaatgcacaagcgaggagtgagtccagatgtagtcacctattcaactgtaatacatgcattttgcaaaatgggtagcttggacattgctatggacaaatttaaccagatggttgatatgggagtacgaccgaatgcaactgtttatcattccctaatccagggtttttgtacacatggggatttagtgaaagcaaaggaattggttactgaaatgaggaacaaagctatgcgtcctcctgatattaagttcttccattcaataatgcagaacctatgcacggaaggaagggtaattgaagcacgggatatcctcgacttgatgctgcacataggtatgaggcctgatgttcccatctttaatttactaatcggtggatactgcctagtccgcgagatggaggatgcaacaaaaatgtttgatgatatggtgtcatatggtttagaaccttgtaacaatacgtatggtatacttattaatggctattgcaaaaatagaaggattgatgacgggcttattctattcaaagagatgctgcgcaagggacttaaacctacaacttttaattataacgtcatactggatggattatttctggctggacgaactgttgctgcaaaggtgaagtttaatgagatggttgaatctggagtaagtgtgtgcattgatacatactctatagttcttggtggactttgtagaaataattgcaccggtgaagcaatcacgctgtccaagaaattaagtacaatgaatgtcaaattcaatattgcaattgtcaatatcttgattggtgcattcttcagggttcggcgaaaccaagaagctaaggatttgtttgctgctataccagccaatggcttggttcctaatgctgttacctacaccataatgatgacaaatcttataaaagaaggttcagtggaagaagctgacaatctttttttatcgatggagaagagcggctgtagtgccaactcttatatgttaaatcatatcatcagaaggttactggaaaaaggagagatggtcaaggctggaaattatatgtctaaagttgatgcaaagagctactcccttgaagctaaaactgtttcactgctgatctctctgttttcaaggaaagggaaatatagagaacacatcaaattgctccctacaaagtatcagtttctggaagaagcagccacagttgaa

SEQ ID NO: 1964 - DNA, 1707 bp, Triticum aestivum
atgatcaacctgggagttcaacctgatgcggtgacctacagctcatttatcaacgcactaagcaagtccggagtaatggacaaggcagaagtggtccttcgacaaatggttgatcaaggcattgtacccaatatcattacgtatactagtctgatccatggatattccacttcgggtcagtggaaagcagcagttaggatattcaaagaaatgacaagtaccggtgttcgaccaaattctgtcacgttgaactcatttattgattccctttgcaagcatagaaagacaaaggaagctagagatatttttgactccatggccgcaaacggccacaaacctgatattttctcctactctactttgcttaatgggtatgtgaaagaaggatgcttcgatgatatgactgatctcttcaattcgatggtatggaatggtattgtacctaaccaccatgttttcaacatactgatcaatgcatatgctaaacgtggactgatggataaggctatgcacatgttcgaagtaatgaggcaacaaggagtaaacccagatgtatttagctatcaaattgtaatggattcactttgcaaaatgggcaggatggatgccgctctggacaaatttaatcagatggtcaatcaaggagtttcacctaacaaagctgtttaccaatgcctggttctgggttcttgctctcatggtcattttgtgaaagccaaggaattgatctctgaagcaattaatagaggtctgtattctaacagtgtgttcttctatcgtgtaataaacgacctttgcaaagaaggaaaggtaaacgaggcacaggatatgtttgacttcatcctaggtattggtcagcgacctgatgtgattatgtacacttcactgatggatggatattgccttgttggcgaggtggagaaagcactgagtgtactcgatgctatgaaatctgctggccttcaacctgatgatgttgtatatggtacacttcttaacggttactgtaaaattggaaggattgccgatggattgagccttttcagggaaatgtcactcagcgtggttaagcccacgactattatatacaacattatactggatgggctgttttgctctgggagaacagtttgtgcaaaggaaaaatttgatatgatgattgaaagtggcataccagtgggcgttgacacatacaatatagttcttcatggactttgtagaaacaattgcactgatgaagcaatagagctgttcaagaaattacgtgctatgaacgtgaagattaatgtcataacactcaataccatgatttctgcattgtttaaaactaggagaattgaagaagccaaggatttgtttgctactatatcagccattgggttggtgccttctgttgtgacttacagtgtaatgatgacaaatttcataaaagaagggttgctggcagatgctgatgatatgttttcagcaatggagaaggctggctgtgctcccaactccagactgctaaatcaagtggtcagggtatttctgaagaatggtgaagttgtaaaggctgtgacttatcttgctaaacttgatgcaaaacagctgtcacttgaagcttcgacggtttcgttaatagtatctctcttctcaaggaaagggaaattaaggaagcatgtaaaattgcttccggtaaagtaccagcctcctgagatgttggac

SEQ ID NO: 1965 - DNA, 2316 bp, Triticum aestivum
atgccaaccgcccgcctgtgctccatctccgcctcctccttcaaggcttcttcaggaaaaccacgagctcctgtcgccgccttggctgctgccactgagcgtgtgcgcgctggaacactaaaccaggaggacgcgcaccacctgtttgacgaattgctaagccaagccgccgccttcccagtaggcgggctgaataactttcttgccacactcgcccgtgcacggccctcagctgcctgcagcaatggccctgcccttgctgtcgccctcttcaaccgcatgtcccgaggccctggtgcacgggtggtgtcgcccacgtgctgtacctattccatcctcatggactgctgctgccgcgcaggccgcccggacttggtgcttgccttcttctgccgcctcctcaggttggggctgagcttgaatgtcacctccttcaacaacctactcaaggggctctgccagtcaaagcgtacaaatgaggctttggacgtgctgctccagcgtacgcccgaactagactgtgcgcctgatgtcgtctcgtacaacatagtaatcaacggctgtttgaaacaaggtgaagtggagaaagcgtgcaatctctaccgtgagatgatcaacctgggagttcaacctgatgcggtgacctacagctcatttatcaacacactaagcaagtccggagcaatggacaaggcagaagtggtccttcggcaaatggttgatcaaggcattgtacccaatatcattacgtatactagtctgatccatggatattccacttcgggtcagtggaaagcagcagttaggatattcaaagaaatgacaagtaccggtgttcgaccaaattctgtcacgttgaactcatttattgattccctttgcaagcatagaaagacaaaggaagctagagatatttttgactccatggccgcaaacggccacaaacctgatattttctcctactctactttgcttaacgggtatgtgaaagaaggatgcttcgatgatatgactgatctcttcaattcgatggtacagaatggtattgtacctaaccaccatgttttcaacatactgatcaatgcatatgctaaacgtggactgatggataaggctatgcacatgttcgaagtaatgaggcaacaaggagtaaacccagatgtatttagctatcaaattgtaatggattcactttgcaaaatgggcaggatggatgccgctctggacaaatttaatcagatggtcaatcaaggagtttcacctaacaaagctgtttaccaatgcctggttctgggttcttgctctcatggtcattttgtgaaagccaaggaattgatctctgaagcaattaatagaggtctgtattctaacagtgtgttcttctatcgtgtaataaacgacctttgcaaagaaggaaaggtaaacgaggcacaggatatgtttgacttcatcctaggtattggtcagcgacctgatgtgattatgtacacttcactgatggatggatattgccttgttggcgaggtggagaaagcactgagtgtactcgatgctatgaaatctgctggccttcaacctgatgatgttgtatatggtacacttcttaacggttactgtaaaattggaaggattgccgatggattgagccttttcagggaaatgtcactcagcgtggttaagcccgcgactattatatacaacattatactggatgggctgttttgctctgggagaacagtttgtgcaaaggaaaaatttgatatgatgattgaaagtggcataccagtgggcgttgacacatacaatatagttcttcatggactttgtagaaacaattgcactgatgaagcaatagagctgttcaagaaattacgtgctatgaacgtgaagattaatgtcataacactcaataccatgatttctgcattgtttaaaactaggagaattgaagaagccaaggatttgtttgctactatatcagccattgggttggtgccttctgttgtgacttacagtgtaatgatgacaaatttcataaaagaagggttgctggcagatgctgatgatatgttttcagcaatggagaaggctggctgtgctcccaactccagactgctaaatcaagtggtcagggtatttctgaagaatggtgaagttgtaaaggctgtgacttatcttgctaaacttgatgcaaaacagctgtcacttgaagcttcgacggtttcgttaatagtatctctcttctcaaggaaagggaaattaaggaagcatgtaaaattgcttccggtaaagtaccagcctcctgagatgttggac

SEQ ID NO: 1966 - DNA, 2316 bp, Triticum aestivum; identical to SEQ ID NO: 1965

SEQ ID NO: 1967 - DNA, 2316 bp, Triticum aestivum
atgccaaccgcccgcctgtgctccatctccgcctcctccttcaaggcttcttcaggaaaaccacgagctcctgtcgccgccttggctgctgccactgagcgtgtgcgcgctggaacactaaaccaggagggcgcgcaccacctgtttgacgaattgctaagccaagccgccgccttcccagtaggcgggctgaataactttcttgccacactcgcccgtgcacggccctcagctgcctgcagcaatggccctgcccttgctgtcgccctcttcaactgcatgtcccgaggccctggtgcacgggtggtgtcgcccacgtgctgtacctattccatcctcatggactgctgctgccgcgcaggccgcccggacttggtgcttgccttcttctgccgcctcctcaggttggggctgagcttgaatgtcacctccttcaacaacctactcaaggggctctgccagtcaaagcgtacaaatgaggctttggacgtgctgctccagcgtacgcccgaactagactgtgcgcctgatgtcgtctcgtacaacatagtaatcaacggctgtttgaaacaaggtgaagtggagaaagcgtgcaatctctaccgtgagatgatcaacctgggagttcaacctgatgcggtgacctacagctcatttatcaacgcactaagcaagtccggagcaatggacaaggcagaagtggtccttcggcaaatggttgatcaaggcattgtacccaatatcattacgtatactagtctgatccatggatattccacttcgggtgagtggaaagcagcagttaggatattcaaagaaatgacaagtgccggtgttcgaccaaattctgtcacgttgaactcatttattgattccctttgcaagcatataaagacaaaggaagctagagatatttttgactccatggccgcaaacggccacaaacctgatattttctcctactctactttgcttaacgggtatgtgaaagaaggatgcttcgatgatatgactgatctcttcaattcgatggtacggaatggtattgtacctaaccaccatgttttcaacatactgatcaatgcatatgctaaacgtggactgatggataaggctatgcacatgttcgaagtaatgaggcaacaaggagtaaacccagatgtatttagctatcaaattgtaatggattcactttgcaaaatgggcaggatggatgccgctctggacaaatttaatcagatggtcaatcaaggagtttcacctaacaaagctgtttaccaatgcctggttctgggttcttgctctcatggtcattttgtgaaagccaaggaattgatctctgaagcaattaatagaggtctgtattctaacagtgtgttcttctatcgtgtaataaacgacctttgcaaagaaggaaaggtaaacgaggcacaggatatgtttgacttcatcctaggtattggtcagcgacctgatgtgattatgtacacttcactgatggatggatattgccttgttggtgaggtggagaaagcactgagtgtactcgatgctatgaaatctgctggccttcaacctgatgatgttgtatatggtacacttcttaacggttactgtaaaattggaaggattgccgatggattgagccttttcagggaaatgtcactcagcgtggttaagcccacgactattatatacaacattatactggatgggctgttttgctctgggagaacagtttgtgcaaaggaaaaatttgatatgatgattgaaagtggcataccagtgggcgttgacacatacaatatagttcttcatggactttgtagaaacaattgcactgatgaagcaatagagctgttcaagaaattacgtgctatgaacgtgaagattaatgtcataacactcaataccatgatttctgcattgtttaaaactaggagaattgaagaagccaaggatttgtttgctactatatcagccattgggttggtgccttctgttgtgacttacagtgtaatgatgacaaatttcataaaagaagggttgctggcagatgctgatgatatgttttcagcaatggagaaggctggctgtgctcccaactccagactgctaaatcaagtggtcagggtatttctgaagaatggtgaagttgtaaaggctgtgacttatcttgctaaacttgatgcaaaacagctgtcacttgaagcttcgacggtttcgttaatagtatctctcttctcaaggaaagggaaattaaggaagcatgtaaaattgcttccggtaaagtaccagcctcctgagatgttggac

SEQ ID NO: 1968 - DNA, 2316 bp, Triticum aestivum; identical to SEQ ID NO: 1967

SEQ ID NO: 1969 - DNA, 2259 bp, Triticum aestivum
atgcctcgtttctcctccaccacgtcaatgtcgtcactccgcctccgcctccacgcccgccactcctcctccgcctctcaaccctcacacagccagggctgggatccccacgccgccttcgccgccgccacggagcgtgcccgctctggcaaactcaccccgaaggacgcacaccacctgttcgacgaattgctgcggcaggccaatcctgtccaggagcgccccctcaacaaccttctctccgcccttgcccgcgctccggcgtccgccgcctgcagaaacggccctgcactcgcggtcaacctcttcgtccgcatatcccaaggcgcccgccgacgtgtggcgcacccaacggcctgcacctacggcatcctcatggactgctgctgccgcgcacaccgcctcgatctggcgttcgctttcttcggccgtctcctcaggacgggacttaaggcaggcgtcattcaagtttgcactcttctcaagggcctctgccgcgcaaagcgggctgatgaggctctcgacgtgctgcttcacaggatgcctgagctgggctgcactcccgatgtggtggcatataccacggtcatccacggcttctttaaggaaggccaagtargcaaggcatgcaatctattccatgaaatggcgctgcagggcgttacacctgatgtggtgacatataactcggttattgatgcgctgtgcaaggccagagcaatggacaaagcagagtatttccttcgtcagatgattggtaatggtgtcgtacctaataatgtgacatataatagcctcatccatggatattcctcttcaggccattggaaggaggcggttagggtgctgaaagaaatgacaagtcaaggtatcatacctgatatcgtttcataccgtattctgcttcatgggtatgccaccgaagggtgcttagttgatatgattaatctcttcaattcaatggcaagatactgtattctacctgattgtcatatcttcaacatactgattaatgcatatgctaaatctgggaagcttgataaggctatgcttatatttaaagaaatgcagaaacaaggagtgagtccaaatgcagtcacatattcaactgtaatagatgcattttgcaaaaagggtcagttggacgatgctatgataaagtttaatcagatgattgatacaggagtaccacagggcacagctgtttatggttctctaatccagggtttttgtacacacggcaatttggtgaaagcaaaggaattgcttactgaaatgatgaacaaaggtatacctcctcctgatattaagttcttccattcaatcatgcagaacctttgcacagaaggaagggtaatagaagcacgggatgtccttggcttgatagcgcacataggtatgaggcctaatgtttgcacatttaatatactgatcggtggatattgcctagtcggcaagatggaggatgcctcaaaaatatttgatgatatgatgtcatatggcttagaaccttctaatattacgtatgctatacttattaatggctattgcaaaaacgaaaggattaacgatgggctgattctgttcaaagaaatgttgcgcaagggacttaaacctacaacttttaattacaacgtcatactggatggattatttctggctggacgaactgttgctgcaaaggaaaagtttgatgagatggttgaatttggagtaagtgtgcgcattgatacatattcgatagttcttggtggactttgtagaaataattgtaacggcgaagcaatcacgctattccagaaattaagcacaatggatgtgaaattcaatattacaattgtcaatataatgattgatgccttctacagggttcagcgaaaccaagaagccaaggatttgtttgctgcagtatcagccaatggtttggtagctaatgtctttacctacaccataatgatgaaaaatcttataaaagaagggtcagtggaagaagctgacgatctctttttatcaatggagaagagcggctgtactgctgactcttatatgttaaatcttatcgtcagaatgttactggaaaaaggagagctagtcaaggctgggaattatatgtctaaagttgatgcaaagagctactcacttgaagctgaaaccgtttcgctgcttatctctctcttttcagggaaagggaaatatagagaacacataggattgctccctacaaagtatcagtttcgtgaagaagcggccacagttgaa

SEQ ID NO: 1970 - DNA, 2259 bp, Triticum aestivum
atgcctcgtttctcctccaccacgtcaatgtcgtcactccgcctccgcctccacgcccgccactcctcctccgcctctcaaccctcacacagccagggctgggatccccacgccgccttcgccgccgccacggagcgtgcccgctctggcaaactcaccccgaaggacgcacaccacctgttcgacgaattgctgcggcaggccaatcctgtccaggagcgccccctcaacaaccttctctccgaccttgcccgcgctccggcgtccgcggcctgcagaaacggccctgcactcgcggtcaacctcttcgtccgcatatcccaaggcgcccgccgacgtgtggcgcacccaacggcctgcacctacggcatcctcatggactgctgctgccgcgcacaccgcctcgatctggcgttcgctttcttcggccgtctcctcaggacgggacttaaggcaggcgtcattcaagtttgcactcttctcaagggcctctgccgcgcaaagcgggctgatgaggctctcgacgtgctgcttcacaggatgcctgagctgggctgcactcccgatgtggtggcatataccacggtcatccacggcttctttaaggaaggccaagtaggcaaggcatgcaatctattccatgaaatggcgctgcagggcgttacacctgatgtggtgacatataactcggttattgatgcgctgtgcaaggccagagcaatggacaaagcagagtatttccttcgtcagatgattggtaatggtgtcgtacctaataatgtgacatataatagcctcatccatggatattcctcttcaggccattggaaggaggcggttagggtgctgaaagaaatgacaagtcaaggtatcatacctgatatcgtttcataccgtattctgcttcatgggtatgccaccgaagggtgcttagttgatatgattaatctcttcaattcaatggcaagatactgtattctacctgattgtcatatcttcaacatactgattaatgcatatgctaaatctgggaagcttgataaggctatgcttatatttaaagaaatgcagaaacaaggagtgagtccaaatgcagtcacatattcaactgtaatagatgcattttgcaaaaagggtcagttggacgatgctatgataaagtttaatcagatgattgatacaggagtaccacagggcacagctgtttatggttctctaatccagggtttttgtacacacggcaatttggtgaaagcaaaggaattgcttactgaaatgatgaacaaaggtatacctcctcctgatattaagttcttccattcaatcatgcagaacctttgcacagaaggaagggtaatagaagcacgggatgtccttggcttgatagcgcacataggtatgaggcctaatgtttgcacatttaatatactgatcggtggatattgcctagtcggcaagatggaggatgcctcaaaaatatttgatgatatgatgtcatatggcttagaaccttctaatattacgtatggtatacttattaatggctattgcaaaaacgaaaggattaacgatgggctgattctgttcaaagaaatgttgcgcaagggacttaaacctacaacttttaattacaacgtcatactggatggattatttctggctggacgaactgttgctgcaaaggaaaagtttaatgagatggttgaatttggagtaagtgtgcgcattgatacatattcgatagttcttggtggactttgtagaaataattgtagcgacgaagcaatcacgctattccagaaattaagcacaatggatgtgaaattcaatattacaattgtcaatataatgattgatgccttctacagggttcagcgaaaccaagaagccaaggatttgtttgctgcagtatcagccaatggtttggtagctgatgtctttacctacaccataatgatgaaaaatcttataaaagaagggtcagtggaagaagctgacgatctctttttatcaatggagaagagcggctgtactgctgactcttatatgttaaatcttatcgtcagaatgttactggaaaaaggagagctagtcaaggctgggaattatatgtctaaagttgatgcaaagagctactcacttgaagctgaaaccgtttcgctgcttatctctctcttttcagggaaagggaaatatagagaacacataggattgctccctacaaagtataagtttcgtgaagaagcggccacagttgaa

SEQ ID NO: 1971 - DNA, 990 bp, Triticum aestivum
atgccagccgcccgcctgtcctccatctccacctcctccttcagggctccttcacgagcccccctcgccgccttggctgccgccacggagcgtgtccgcgcgggaacgctgagccaggaggacgcgcaccacctgttcgaccaattgcttggccaagccgccgccgtcccggaacgcgggctcaacaactttcttgccgcactcgcccgtgctccaccctcagctgcctgccgcgatggccccggccttgccatcgccctcttcaaccgcatgtcccgaggcgctggtgcacgggtggcgtcgcccacgctctgtacctattccatcctcatggactgctgctgccgcgcaggccgcccggacttggtgcttgccttcttcggccgcctcctcaggttggggctgcgcttggatatcatctcctccagcaatctcctcaaggggctctgccaggccaagcgttcaaatgaggctttggacatgctgctccaccggatgcccgaactggactgtgtgcctgatgtcttctcgtacagcatagtaatcaacggctgttttaaacaaggtgaagtagacaaagcgtgcaatctcttccatcagatgccccaactgggagttcaacctaatgtggtgatctacaactcagttatcgacgcactaagcaaatccggagcaatggacaaggcagaagtggtccttcggcaaatggttgatcaaggaattgaacccaatatcaagacatataactgtctgatccatggatattctacttttggtcagtggaaggaggcacttagggtattcaaagaaatggcaagtcttggtgttgtaccagacgttgtcacgttgacctcattaatcgattccctttgcaagcacagaaggacaaaggaagctagagaaatttttgactctatggctgcaaagggcctgcctggttctgggttcttgctctcatggtcattttgtgaaagccaaggatttgatctc

SEQ ID NO: 1972 - DNA, 990 bp, Triticum aestivum; identical to SEQ ID NO: 1971

SEQ ID NO: 1973 - DNA, 990 bp, Triticum aestivum
atgccagccgcccgcctgtcctccatctccacctcctccttcagggctccttcacgagcccccctcgccgccttggctgccgccacggagcgtgtccgcgcgggaacgctgagccaggaggacgcgcaccacctgttcgaccaattgcttggccaagccgccgccgtcccggaacgcgggctcaacaactttcttgccgcactcgcccgtgctccaccctcagctgcctgccgcgatggccccggccttgccatcgccctcttcaaccgcatgtcccgaggcgctggtgcacgggtggcgtcgcccacgctctgtacctattccatcctcatggactgctgctgccgcgcaggccgcccggacttggtgcttgccttcttcggccgcctcctcaggttggggctgcgcttggatatcatctcctccagcaatctcctcaaggggctctgccaggccaagcgttcaaatgaggctttggacatgctgctccaccggatgcccgaactggactgtgtgcctgatgtcttctcgcacagcatagtaatcaacggctgttttaaacaaggtgaagtagacaaagcgtgcaatctcttccatcagatgccccaactgggagttcaacctaatgtggtgatctacaactcagttatcgacgcactaagcaaatccggagcaatggacaaggcagaagtggtccttcggcaaatggttgatcaaggaattgaacccaatatcaagacatataactgtctgatccatggatattctacttttggtcagtggaaggaggcacttagggtattcaaagaaatggcaagtcttggtgttgtaccagacgttgtcacgttgacctcattaatcgattccctttgcaagcacagaaggacaaaggaagctagagaaatttttgactctatggctgcaaagggcctgcctggttctgggttcttgctctcatggtcattttgtgaaagccaaggaattgatctc

SEQ ID NO: 1974 - DNA, 2337 bp, Triticum aestivum
  misc_feature (138)..(138): n is a, c, g, or t
atgtttatcaatttcgcaaacttttatcaaattcatgaactttttcgtcaaattcataaaaaaattcaaatcgatggaaaaaaattcaattttgcaaacttttttcaaatcgtcaactttttgttaaattcgtggacntttttttttttgcaagtgcatggaattgacgcccctgcggcacgggcgctagtcgctacatggtggcagaaatttgccgggttgcaactcacccgagaagaaaatgtgatgcatccctctgatccgatcttcggggcgccctggggatcaagaaatagcattgataagagtgcagctcacctgatgggtgtgagcattactcggaaagactcatcagaaaatcatcaagtgccattgtaccccaagcacacgcccccgccgccgccagactcgtcagccgcgtacgaggccgctcaccggcgggcaagtccaccggtcccgcctcctgcgttcacttcctcggcagcggcgctggttgctgcgcgcgcgccgagcgtcgcaggtgacaccaatcgatcgcggtgcgcctcttcagcggacgcacgcacatcccgcgtcgagctcggctggaatcggccagaaatgccagccgcccgcctgtcctccatctccacctcctccttcagggctccttcacgagcccccctcgccgccttggctgccgccacggagcgtgtccgcgcgggaacgctgagccaggaggacgcgcaccacctgttcgaccaattgcttggccaagccgccgccgtcccggaacgcgggctcaacaactttcttgccgcactcgcccgtgctccaccctcagctgcctgccgcgatggccccggccttgccatcgccctcttcaaccgcatgtcccgaggcgctggtgcacgggtggcgtcgcccacgctctgtacctattccatcctcatggactgctgctgccgcgtaggccgcccggacttggtgcttgccttcttcggtcgcctcctcaggttggggctgcgcttggatatcatctcctccagcaatctcctcaaggggctctgccaggccaagcgttcaaatgaggctttggacatgctgctccaccggatgcccgaactggactgtgtgcctgatgtcttctcgtacagcatagtaatcaacggctgttttaaacaaggtgaagtagacaaagcgtgcaatctcttccatcagatgccccaactgggagttcaacctaatgtggtgatctacaactcagttatcgacgcactaagcaaatccggagcaatggacaaggcagaagtggtccttcggcaaatggttgatcaaggaattgaacccaatatcaagacatataactgtctgatccatggatattctacttttggtcagtggaaggaggcacttagggtattcaaagaaatggcaagtcttggtgttgtaccagacgttgtcacgttgacctcattaatcgattccctttgcaagcacagaaggacaaaggaagctagagaaatttttgactctatggctgcaaagggcctgaaacctaatatcgtctcctactctactatgcttaatgggtatgtcaaagaaggatccttcgaggatatgactgatctcttcaattcgatggtacggaatggtgttgtaccaaaccaccatattttcaacatactgatcaatgcatatgctaaacgtggactgatggatgaggctatgcacatgttcgaagtaatgaggcaacaaggagtaaacccagatgtagttgactatctagtaataatggattcactttgtaaaatgggtaggatggatgctgctgtggacaaatttaatcagatggtcaatcaaggagtttcacctaacaaagctgtttaccaatgcctggttctgggttcttgctctcatggtcattttgtgaaagccaaggatttgatctctgaagcaattaatagaggtctgttttctaacagtgtgttcttctatcctgtaataaacgacctatgcaaagaaggaaaggtaaacgaggcacaggatatgtttgacttcattctaggtattggtcggcggcctgatgtgattatgtacaattcactgatggatggatattgccttgttggcaaggtggaggaagcactaagagtacttgatgctatgaagtctgctggcctccaacctactgctgttacgtatgctatacttcttaatggctactgtaaaattggcaggatcgccgatggattgagtcttttcagggaaatgtcactcagcggggttaaacccacgacttttatcaacaacaacaacaacaacaaagcctttagtcccaaacaagttggggtaggc

SEQ ID NO: 1975 - DNA, 2295 bp, Triticum aestivum
atgccaaccgcccgcctgtcctccatctccacctcctccttcagggcccccctcgccgccttggctgccgccacggaacgcgttctcgctggaacgctaagccgggaggatgcgcaccacctgttcgacgaattgctaggccaagccgccgccgccccggaacacgggctgaacaactttcttgccgcactcgcccgtgctccaccctcagctgcctgcagcgatggccccggccttgccatcgccctcttcaaccgcatgtcccgaggcgctggtgcacgggtggtgtcgcccacgctctgtacctattccatcctcatggactgctgctgccgtgcacgccgcccagagttggtggttgccttcttcggccgcctcctcaggttggggctgcgcttggatatcatctcctccagcaatctcctcaaggggctctgccaggccaagcgttcaaatgaggctttggacatgctgctccaccggatgcccgaactggactgtgcacctgatgtcttctcgttcaacatagtaatcaacggctgctttaaagaaggtgaagtagacaaagcgtgcaatctcttccatgagatgccccaactgggagttcaacctgatgtggtcacctacacctcaatcatcaacgcactaagcaagtctggagcaatggacaaggcagaagtggtccttcggcaaatggttgatcaaggcattggacccaacatcaggacatatactagcctgatacatggatattccgcttcgggtcagtggaaggcggcagctagagtattcaaagagatggtaagtcttggtgttctaccaaatgttgtcacatggaactcatttatggattcactttgcaagcatagaaggacaaaggaagctcgagatatttttgactccatggctgcaaagggtcaaaaacctgatattgtctcctactctattatgcttaacgggtacgcgaaagaaggatacttcgatgacatgactgatttgttcaattcgatgctacagaatggtattgtacctaatcaccatgttttcaacatattgattaatgcatatgctaaacgtggactgatggatgaggctatgcacatgtttgaagtaatgaggcaacaaggagtaaacccaaatgtagttagctatcaagtcataatggattcactttgtaaaatgggtaggatggatgctgctctggaaaaatttaatcagatggtcaatcaaggagtttcagctgacaaagctgtttaccgatgcctggttctgggttcttgttctcatggtgattttgtgaaggccaaggaattgatttctgaagccgttaatagaggtctgtgttctaacagtgtgttcttctattctgtaataaatgacctgtgcaaagaaggaaaggtgaaggaggcacaggatatgtttcacttcattgtaggtattggtcagcggcctgatgtgattatgtacacttcactgatggatggatattgccttgttggcaaggtggaggaagcactgagagtacttgatgctatgaagtctgctggcctccaacctactgctgttacgtatgctatacttcttaatggctactgtaaaattggcaggatcgccgatggattgagtcttttcaaggaaatgtcactcagcggggttaaacccacgactattatgtacaacattatacttgatgggctgtttcgctccgggagaacagtttctgcaaaggaaaaattctgtacgatgagcgaaagtggcataccagtgggcattgacacatacaacatagttcttagtggactttgtaaaaataattgcactggtgaagcaatagagctattcaagaaactacgtgcaatgaatgtgaagattgatgtcataacactcaatatcatgatttctgcaatgtttaaaactaggagaattgaagaagccaaggatttgtttgctactatatcagccatcgggttggtgccttctgttgtgacatacagcttaatgatgacaaacttcataaaagaagggttgctggcagaggctgatgatatgtttttagcagtggagaaggctaactgtgctcccaactccaggctgctaaatcatgtggtcagggtgttgctggaaaaaggtgcagttgtaaagggtgcaaattatctggctaaacttgatgcaaaacagatgtcacttgatgtttcaacgatttcgttaattgtgtctctcttctcaggggaagggaaattgagggagcacgtaaaattgcttccggtaaagtaccagcctcctgagaattccggc

SEQ ID NO: 1976 - DNA, 2295 bp, Triticum aestivum
atgccaaccgcccgcctgtcctccatctccacctcctccttcagggcccccctcgccgccttggctgccgccacggaacgcgttcgtgctggaacgctaagccgggaggatgcgcaccacctgttcgacgaattgctaggccaagccgccgccgccccggaacacgggctgaacaactttcttgccgcactcgcccgtgctccaccctcatctgcctgcagcgatggccccggccttgccatcgccctcttcaaccgcatgtcccgaggcgctggtgcacgggtggtatcgcccacgctctgtacctattccatcctcatggactgctgctgccgtgcacgccgcccagagttggtggttgccttcttcggccgcctcctcaggttggggctgcgcttggatatcatctcgtccagcaatctcctcaaggggctctgccaggccaagcgttcaaatgaggctttggacatgctgctccaccggatgcccgaactggactgtgcgcctgatgtcttctcattcaacatagtaatcaacggctgctttaaagaaggtgaagcagacaaagcgtgcaatctcttccatgagatgcctcaactgggagttcaacctgatgtggtcacctacacctcaatcatcaacgcactaagcaagtctggagcaatggacaaggcagaagtggtccttcggcaaatggttgatcaaggcattggacccaacatcaggacatatactagcctgatacatggatattccgcttcgggtcagtggaaggcggcagctagagtattcaaagagatggtaagtcttggtgttctaccaaatgttgtcacatggaactcatttatggattcactttgcaagcatagaaggacaaaggaagctcgagatatttttgactccatggctgcaaagggtcaaaaacctgatattgtctcctactctattatgcttaacgggtacgcgaaagaaggatacttcgatgacatgactgatttgttcaattcgatgctacagaatggtattgtacctaatcaccatgttttcaacatattgattaatgcatatgctaaacgtggactgatggatgaggctatgcacatgtttaaagtaatgaggcaacaaggagtaaacccaaatgtagttagctatcaagtcataatggattcactttgtaaaatgggtaggatggatgctgctctggacaaatttaatcagatggtcaatcaaggagtttcacctgacaaagctgtttaccgatgcctggttctgggttcttgttctcatggtgattttgtgaaggccaaggaattgatttctgaagctgttaatagaggtctgtgttctaacagtgtgttcttctattctgtaataaatgacctgtgcaaagaaggaaaggtgaaggaggcacaggatatgtttcacttcattgtaggtattggtcagcggcctgatgtgattatgtacacttcactgatggatggatattgccttgttggcaaggtggaggaagcactgagagtacttgatgctatgaagtctgctggcctccaacctactgctgttacgtatgctatacttcttaatggctactgtaaaattggcaggatcgccgatggattgagtcttttcaaggaaatgtcactcagcggggttaaatccacgactattatgtacaacattatacttgatggactgtttcgctccgggagaacagtttctgcaaaggaaaaattctgtacgatgagcgaaagtggcataccagtgggcattgacacacacaacatagttcttagtggactttgtaaaaataattgcactggtgaagcaatagagctgttcaagaaactacgtgcaatgaatgtgaagattgatgtcataacactcaatatcatgatttctgcaatgtttaaaactaggagaattgaagaagccaaggatttgtttgctactatatcagccatcgggttggtgccttctgttgtgacatacagcttaatgatgacaaacttcataaaagaagggttgctggcagaggctgatgatatgtttttagcagtggagaaggctaactgtgctcccaactccaggctgctaaatcatgtggtcagggtgttgctggaaaaaggtgcagttgtaaagggtgcaaattatctggctaaacttgatgcaaaacagatgtcacttgatgtttcaacgatttcgttaattgcgtctctcttctcaggggaagggaaattgagggagcacgtaaaattgcttccggtaaagtaccagcctcctgagaattccggc

SEQ ID NO: 1977 - DNA, 1713 bp, Triticum aestivum
atgccccaactgggagttcaacctgatgtggtgacctacaactcaattattgacgcactaagcaagtccggagcaatggacaaggcagaagtgctccttcggcaaatggttgatcaaggaattgaacccaatatcaggacatatagctgtctaatccatggatattctacttttggtcagtggaaggaggcacttagggtattcaaagaaatggcaagtcttggtgttgcaccagacgttgtcacgttgagctcattaatcgattccctttgcaagcacagaaggacaaagcaagctagagaaatttttgactctatggctgcaaagggcctgaaacctgatatcgtctcctactctactatgcttaatgggtatgtcaaagaaggatccttcgaggatatgactgatctcttcaattcgatggtacggaatggtattgtacctaatcaccatgttttcaacatactgatcaatgcatatgctaggcgtggactgatggatgaagctatgcacatgttcgaagtaatgaggcaacaaggagtaaacccggatgtagttagctatctagtagtaatggattcactttgcaaaatgggtaggatggatgctgctctggacaaatttaatcagatggtcaatcaaggagtttcacctaacaaagctgtttaccaatgcctggttctgggttctttctctcatggtgattttgtgaaagccaaggaattgatttctgaagcagttaatagaggtatgtgttctaacagtgtgttcttctatcctgtaataaacgacctttgcaaagaaggaaaggtaaaggaggcacaggatatgtttgacttcatcctaggtattggtcagcggcctgatgtgattatgtacacttcactgatggatggatattgccttgttggcaaggtggagaaagcactgagtgtactcgatgctatgaaatctgctggccttcaacctgatgatgttgtatatgctacacttcttaacggttactgtaaaattggaaggattgccgatggattgagccttttcagggaaatgtcactcagcggggttaagcccacgactattatatacaacattatactggatgggctgttttgctctgggagaacaggttttgcaaaggaaaaattccatacgatgactgaaagtggcataccagtaggcgttgacacatacaacatagttcttagtggactttgtagaaacaattgcactgatgaagcaatagaactgttcaagaaactacgtgcaacgaacgtgaagattgatgtcatgacactcaatatcatgatttctgcaatgtttaaaactaggagaattgaagaagctaaggatttgtttgctactatatcagccatcggattggtgccttctgttgtgacttacagtttaatgatgacgaatttcataaaagaagggttgttggcagacgctgatgatacctttttggtaatggagaaagctggctgtgctcccaactccagtctgctaaatcaggtggtcagggtgttgctggaaaaaggtgcagttgtaaaggctgcaacttatctcgctaaacttgatgctaaacagctgtcagttgaagcttcaacgatttcgttaatagtatctctcttctcaggggaagggaaactaagggagcatgtagagttgcttccagtaaagtaccagcctcctcagagttcggctgacaat

SEQ ID NO: 1978 - DNA, 2145 bp, Triticum aestivum
atgagccgccgcgttgtccccgtcggcagacgcatcttggagcagaacatcaagggccggtaccgcacgggacacattggcaccgtggatgcactccacctgtttgacgaattgctccaggttgctcagccctcctcgattgctgccatcaactgcctcctcaccgtcttcggccgtgattgccctgcgctcggcgtctccctcttcaaccgtgttgcaagaaccaaggtgcctctccagagtgtcacctatggcattctagtcaactgctgctgcggcgctggccgcttggacctcggttttgccgccatgggcaacatcattaagatgggttttatgaaagaatccgttgttgctttcagccacctactcaaggccatctgtgcggagaacaagacaagctatgcaatggacatcgtactccgagtaatgcctgagcttaactgcacacccaacattttctcctacagcattcttttcaagggtctctgcaacgacaagagaagccaagaggctctcgacctgattcacatcatggttgagcatggaggtagctgccaacctaatgtggtgtcctatagcaccgtaattgatggcttgttgaaagagggtgaagtgaacaaggcttacagtctattttgtgaaatgttacagaggggaatttcgccggatgttgtgacctgtagttcgattatttctggcatgtgcaagcttcatgcgatggacaaggctgaggacgttcttcaacagatgcttgatagaggaattctgccagatgttgctacatatactagtctaatgcatggatattattcattaggacagtgcgaggaggtggatcggattttcaaagaaatgtctagaaatggtgttcaaccagatattgtaacttacaatatacagatggattatctttgcaagagcggaagatgcgcagaagctaggaagatttttgattccatggtcagtttgggccaaaaaccagatgttactacctacaacgttctgcttcatgggtatgctatggaaagatcttttcatgatatgaattgtctcattgagttgatggatgataatggtatttcaccagatcattatggctacaacatactcatatctgcttatgctaaagaaaaaatggttgatgaagtaatgcatatatttacaaaaatgcggcagcaaggactgaaccctgatgtagcgaactatggagcggcagtaaacttgctttccaagattggccgaatggatgatgctatgtcccaattcaatcaaatgataactgaagggttagctcctgatatcatagttttcaccccccttattagtggtttctgttcttgtggcaaatgggagaaggttgatgaactattttctgagatgttggatcgcggcatctgtcccaacacagtgttcttcaacacaattatggaccgcctttgcaaaaatggaagggttatggaagcccaagatctcttcgacctgatggtacacatgggtgtgaagcctgatgtgtgtacttataacacactgataggtggatacttgttcgttggtaagatggatgaagtgagcaagttacttgacaatatggtctcaattggcatggaaccagatgttatcacctataacatactgattgatggttactctaagaatggaaggatagatgatgcattggttgttttcagggaaatgttggacaggaaggttaagccttgtgttatcacttttaatagtatgattggtgcattgcttaaatgtggtaggaaggcagaagccaaagatttgtttgacggtatctgggccaacggattagtgcccgacgttattacatatagcttaatgatacaaaaacttattgaagaaggttctctacaagagtctgatgatctattcctttctatggagaagaatggatgtgctgccgactcccgtatgctaaattctatggttagaagcttacttcagaaaggggaggtgcccagggctgggacttatctgtctaaaattgatgagaggaggttcacctttgaagcgtccacagctagcttgttggctgcacttgcgtcagggggaaaaagccaggaatataaggagttactccctgaaaaataccactattttctggaacagggcactgat

SEQ ID NO: 1979 - DNA, 2145 bp, Triticum aestivum; identical to SEQ ID NO: 1978

SEQ ID NO: 1980 - DNA, 2145 bp, Triticum aestivum; identical to SEQ ID NO: 1978

SEQ ID NO: 1981 - DNA, 2223 bp, Triticum aestivum
atgcctcgcttctcctccaccacgccaatgtcgccaccccgcctcctcctccggctcggcgcccgccactcctcctccacctctcatccctcacgcatctgggatccccacgccgccttcgccgctgcgacgcagcgggcgcgctctggcacgctcaccacggaggacgcacaccacctgtttgatgaattgctgcggcagggcaatcctgtccaggagcgtcccttgactaactttctggctgccctcgcccgcgcgcccgcgtccgcattctgcagcgatggccctgccctggccgtcgccctcttcggccgtttgtcccgaggcgccggacgacgggtggcgcagccaaatgtcttcacctatggcgtcctcatggactgctgctgccgtgcgcgccgcctggatctagcgatcgccttcttcgcccgtctcctcaagacgggactggaggcaaaccaagtcatcttctgcaccctcctcaagggactctgccacgcaaagcgctcagatgaggctttggacgtggtgcttcacaggatgcctgagctaggctgcacccccaacgtggtggcctataccacggtcatccacggcttcttgaaggaaggccaagtaggcaaggcatgcaatctattccatggaatggcgcagcagggcgttgcgcctgatgtggtgacatataactcggttatcgatgcgttgtgcaaggccagagcaatggacaaggcagagtatttcctttgtgaaatggttgataatggtgtcgtacctaataatgtgacatataatagcctcatccatggatattcctctttgggccatcagaaggaggctgttagggtgctgaaagaaatgacaagacagggtatcataccagatgtcattacctgcacctcactcatgaccttcctttgcaagaatggaaaaagcaaggaagctgcagaaatttttgattcaatgcccacgaagggcctgaaacatgacgccgtttcatatgctattctccttcatgggtatgccactgaaggatgcttggttgatatgattaatctcttcaattcgatggacagagactgtattctacctaactgtcatatcttcaacatactgatttatgcatatgctaaatctgggaagcttgataaggctatgcttatatttagagatatgcagaaacaaggagtgagtccagatgcagtcacatattcaaccgtaatacatgcattttgcaaaaagggtaggttggatgatgctgtgataaagtttaatcagatgattgatacaggagtacgaccggaagcatctgcttatcgttccctaatccagggtttttgtacacatggcgatttggtgaaagcaaaggaatatgttactgaaatgatgaagaaaggtatgcttcctcctgatattatgttcttcagttcaatcatgcagaaactatgcacagaaggaagggtaatagaagcacgagatatccttgacttgatagtgcgcattggtatgaggcctaatgttttcatatttaatatactgatcggtgggtactgcctagtctgcaagatggaggatgcaacaaaaatgtttgaggatatggtgtcatttggtttagaaccttgtaatattacgtatggtatacttattaatggctattgcaaaaatagaaggattgatgatgggcttattctgttccaagagatgctgcacaagggacttaaacctacaacttttaattataatgtcatactggatgggttatttctggctggacgaactgttgctgcaaaggaaaagtttgatgagatggttgaatctggagtaagtgtgtgcagtgatacatattcgatagttcttgctggactttgcagaaataattgctctagcgaagtaatcatgctgttccagaaattaagggcaatgaacatgaaattcaatattagaattgtcactatcatgattgatgccttctacaaggttcggcgaaaccaagaagctaaggatttgtttgctgcaataccatccaatggcttggtagctaatgttgttacctacagcataatgatgaaaagtcttataaaagaaggttcagtggaagaagctgacactctttttatcgatggagaagagcggctgtactgcaaactcttggatgttaaatcatattatcagaaggttactggaaagaggagagatagtcaaggctggaaattatatgtcgaaagt

SEQ ID NO: 1982 - DNA, 2223 bp, Triticum aestivum; identical to SEQ ID NO: 1981

SEQ ID NO: 1983 - DNA, 2223 bp, Triticum aestivum
atgcctcgcttctccaccaccacgccaatgtcgccaccccgcctcctcctccgactcggcgcccgccactcctcctccacctctcatccctcacgcatctgggatccccacgccgccttcgccgctgcgacgcagcgggcgcgctctggcacgctcaccacggaggacgcacaccacctgtttgatgaattgctgcggcagggcaatcctgtccaggagcgtcccttgactaactttctggctgccctcgcccgcgcgcccgcgtccgcattctgcagcgatggccctgccctggccgtcgccctcttcggccgtttgtcccgaggcgccggacgacgggtggcgcagccaaatgtcttcacctatggcgtcctcatggactgctgctgccgtgcgcgccgcctggatctagcgatcgccttcttcgcccgtctcctcaagacgggactggaggcaaaccaagtcatcttctgcaccctcctcaagggactctgccacgcaaagcgctcagatgaggctttggacgtggtgcttcacaggatgcctgagctaggctgcacccccaacgtggtggcctataccacggtcatccacggcttcttgaaggaaggccaagtaggcaaggcatgcaatctattccatggaatggcgcagcagggcgttgcgcctgatgtggtgacatataactcggttatcgatgcgttgtgcaaggccagagcaatggacaaggcagagtatttcctttgtgaaatggttgataatggtgtcgtacctaataatgtgacatataatagcctcatccatggatattcctctttgggccatcagaaggaggctgttagggtgctgaaagaaatgacaagacagggtatcataccagatgtcattacctgcacctcactcatgaccttcctttgcaagaatggaaaaagcaaggaagctgcagaaatttttgattcaatgcccacgaagggcctgaaacatgacgccgtttcatatgctattctccttcatgggtatgccactgaaggatgcttggttgatatgattaatctcttcaattcgatggacagagactgtattctacctaactgtcatatcttcaacatactgatttatgcatatgctaaatctgggaagcttgataaggctatgcttatatttagagatatgcagaaacaaggagtgagtccagatgcagtcacatattcaaccgtaatacatgcattttgcaaaaagggtaggttggatgatgctgtgataaagtttaatcagatgattgatacaggagtacgaccggaagcatctgcttatcgttccctaatccagggtttttgtacacatggcgatttggtgaaagcaaaggaatatgttactgaaatgatgaagaaaggtatgcttcctcctgatattatgttcttcagttcaatcatgcagaaactatgcacagaaggaagggtaatagaagcacgagatatccttgacttgatagtgcgcattggtatgaggcctaatgttttcatatttaatatactgatcggtgggtactgcctagtctgcaagatggaggatgcaacaaaaatgtttgaggatatggtgtcatttggtttagaaccttgtaatattacgtatggtatacttattaatggctattgcaaaaatagaaggattgatgatgggcttattctgttccaagagatgctgcacaagggacttaaacctacaacttttaattataatgtcatactggatgggttatttctggctggacgaactgttgctgcaaaggaaaagtttgatgagatggttgaatctggagtaagtgtgtgcagtgatacatattcgatagttcttgctggactttgcagaaataattgctctagcgaagtaatcatgctgttccagaaattaagggcaatgaacatgaaattcaatattagaattgtcactatcatgattgatgccttctacaaggttcggcgaaaccaagaagctaaggatttgtttgctgcaataccatccaatggcttggtagctaatgttgttacctacagcataatgatgaaaagtcttataaaagaaggttcagtggaagaagctgacactctttttatcgatggagaagagcggctgtactgcaaactcttggatgttaaatcatattatcagaaggttactggaaagaggagagatagtcaaggctggaaattatatgtcgaaagt

SEQ ID NO: 1984 - DNA, 2223 bp, Triticum aestivum; identical to SEQ ID NO: 1983

SEQ ID NO: 1985 - DNA, 930 bp, Triticum aestivum
atgcctgagctgggctgcacccctgacgtggtggcgtatagcacggtcatccatggcttcttcaaggaaggccaagtaggcaaggcatgcaatctgttccatggaatggcacagcagggcgttgcgcctgacgtggtgacatataactcggttattgatgcactgtgcaaggccagagcaatggacaaggcggagtatttccttggtcagatggttgatagtggtgtcgtacctaacaatgtgacatataatagcctcatccatggatattcctcttcaggccattcaaaggaggcggtcagggtgctgaaagatatgacaagtaagggtatcataccagatgtttttacttgcaactcgctcatggcctccctttgcaagaatggaagaagcaaagaagctgcagaaatttttaattcaatgtccatgaagggcctgaaacctaacaccatttcatatgctattctccttcatgggtatgccactgaaggatgcttggttgacatgatcaatctcttcaattcaatggctacagactgtattctacctaactgtcatatcttcaacatactgattaatgcatatgctaaatatgggaagcttgataaggctatgcttatatttaaagatatgcagaaacaaggagtgagtccagatgcagtcacatattcaaccgtaatacatgcattttgcaaaaagggtaggttggatgatgctgtgataaagtttaatcagatgattgatacaggagtactactggaagcatctgtttatcgttccctaatccagggtttttgtacacatggcgatttggtgaaagcaacggaatatgttactgaaatgatgaagaaaggtatgcttcctcctgatattatgttcttcagttcaatcatgcagaacctatgcacagaaggaagggtaatagaagca

SEQ ID NO: 1986 - DNA, 2145 bp, Triticum aestivum
atgagccgccgccttgtccccgttggcagacgcatcttggagcagaacatcaaggcttggtaccacgccggagacattggcaccaaggacgcactccaccggtttgacgaattgctccaggatgctgggtcctcctcgatccgtgccgtcaactatctccttactgttgtcggacgtgattgccctgcgctcggcgtctccctcttcaaccgcgtcgcaagggccaaggtggcacccaacagtatcacgtacaccatcctcgtcgactgctgctgccgtgctggccgcttggacctcggtttcgctgccatgggccacatcattaagatgggatttacagcagacgcgatcttctctttcagccacctactaaagtccatatgtgcggagaagaagaccagctatgcaatggacatcgtactccgagtaatgcctgagcttaactgcacaccggacattttctcctatagcattcttttcaagggtctctgcaacgagaagagaagccaagaggctcttgagctgattcacatcatggttgaggatggaggttgctgccgacctgatgtggtgtcctatagcaccgtaattgatggcctgttgaaagagggtgaggtggacaaggcttacggcctattctgtgaaatgctacagaggggaatttcgccggatgatgtgacctataactcaatcatctctggcatgtgcaaggttcatgcgatggacaaggctgaggaggttcttcaacagatgtttgatagaggaattctgccagatgttgccacatataatagtctaatacatggatattattcattaggaaggtgcaaagaggttgatcggattttcaaggaaatgtctagaaatggtgttcaaccagatattgtaacttacaatatacagatggattatctttgcaagaatggaagatgcacagaagctaggaagatttttgattccatagtcagtttgggccaaaaaccgactgttactacctatagcattttgcttcatgggtatgctctggaacgatcttttcatgagatgcattgtctcattgatttgatggtgggaaatggtattgcgccagatcattttgtctacaacatactcatatctgcatatgctaaagaagaaatgattggtgaggtaatgcatatatttaaaaaaatgcggcagcatggattgaaccctgatgtagcgaactatggagcggtagtaaacttactttccaagattggccgaatggatgatgctatgtcccaattcaatcaaatgataactgaagggttagctcctgatatcataattttcaccccccttattagtggtttctgttcttgtggcaaatgggagaaggttcatgaactattttctgagatgttggatcgcggcatctgtcccaacacagtgttcttcaacacaattatggaccgcctttgcaaaaatggaagggttatggaagcccaagatctcttcgacctgatggtacacatgggtgtgaagcctgatgtgtgtacttataacaaactgacaggtggatacttgttcattggtaagatggatgaagtgagcaagctacttgacaatatggtctcaattggcatggaaccagatgttatcacctataacatactgattgatggttactctaagaatggaaagataaatgatgcattggttttttttagggaaatgttggaagggaaggttaagccttctgttatcatttttaatattatgattggtgtgttgcttaaatgtggcaggaaggaagaagccaaagatttgtttgatggtatctgggccaaaggattagtgcctgatgttgttacatatagcttaatgatacaaaagcttatagaagaaggttctctacaagagtctaatgatctattcctttctatggagaagaatggatgtgctgccgactcccgtatgctaaatgctatagttagaagcttacttcagaaaggggaggtgcccagggctgggacttatctgtctaaaattgatgagaggaggttcacccttgaagcttccactgctagcttgttgactgcacttgtgtcaggggggaaaggccaggaatataaagagttgctcccggaaaaataccactcgtttctggaacagggcactgat

SEQ ID NO: 1987 - DNA, 2145 bp, Triticum aestivum; identical to SEQ ID NO: 1986

SEQ ID NO: 1988 - DNA, 2145 bp, Triticum aestivum; identical to SEQ ID NO: 1986

SEQ ID NO: 1989 - DNA, 2145 bp, Triticum aestivum; identical to SEQ ID NO: 1986

SEQ ID NO: 1990 - DNA, 2145 bp, Triticum aestivum; identical to SEQ ID NO: 1986

SEQ ID NO: 1991 - DNA, 2145 bp, Triticum aestivum; identical to SEQ ID NO: 1986

SEQ ID NO: 1992 - DNA, 2199 bp, Triticum aestivum
atgcgccgccgccttgtcaccgtcggcagacgcatcttggagcagaaaattcaagaccggcaccgtgccggagacattggcagacgcatcttggagcagaacatcaaggctcggtaccacgctggagacattggcaccgaggatgcactcaacctgttcgacgaattgatccaggttgctcagccctcctcgatcagggccatcaactgcctgctcaccgttgttggccgtgattgccctgcgctcggcgtctccctcttcaaccgtgttgcaagagccaaggtgcctccacacaatatcacctatggcattctagtcgactgctgctgccgtgctggccgcttggaccttggacacgctgccatgggacacgtcattaagttgggatttacagcagaagctatcatcaatttcagccacctactcaaggccatctgtgcagtgaagaagaccagctatgcaatggacatcgtactccgagtaatgcctgagtttaactgcacaccgaacattttctcctacagcattcttttcaagggtctttgcaatgaaaggagaagccaagaggctcttgagctgattaatattatggttgaggatggaggtagctgccaacctgatgtggtgacctataacactgtaattgatggcttgttgaaagagggtgaggtggaccaagcttacagcctattttctgaaatgctgcgtcagggggtatcaccgaatgttgtgacatgtaattcaatcatctctggcatgtgcaagcttcacgcgatggacaaggctgaggaggttcttcaacagatgcttgatagacgaattctgccagatgttgccacatataatagtctgatacatggatattattcattaggacagtgcgaagaggtggatcggattttcaaggagatgactacaaatggtgttcaaccagatattgtaacttacaatatacagatggattatctttgcaagaatggaagatgcgcagaagctaggaagatttttgattccatgatcagtttgggccaaaaacctactgttactacctacaacattctgcttcatgggtatgctatggaaagatcttttcatgatatgaattgtctcattgagttgatggatgataatggtatttcaccagatcattatggctacaacatactcatatctgcttatgctaaagaaaaaatggttgatgatgtattgcatatatttacaaaaatgcggcagcaaggattgaaccctgatgttgcgaactatggagcggtaataaacttgctttctagtattggccgaatggatgacgctatgtcccaatacaatcaaatgataaatgaagggttagctcctgatatcatagttttcaactcccttattagtggtttctattcttgtggcaaatgggagaaggttcatgaactattttctgagatgttggatcgcggcatctgtcccaacacagtgttcttgaacacaattatggaccgcctttgcaaaaatgaaagggttatggaagcccaagatctcttcgacctgatggtacacatgggtgtgaagcctgatgtgtggacttataacacactgataggtggatacttgtttgttggtaagatggatgaagtgaggaagttacttgacaatatgtgctcaattggcatggaaccagatgttgtcacctatagcatactgattgatggttactctaagaatggaagaatagatgatgcatttgttgttttcaaggaattgttgggagggaaggttaagccttgtgttatcacttttactattatgattggtgcgttgcttaaatgtggcaggaaggaagaagccaaagatttgtttgatggtatctgggccaacggattagtgcccaacgttattacatatagcttaatgatacaaaaccttatagaagaaggttctctacaagagtctgatgatctattcctttctatggagaagaatgggtgtgctgctgactcacgtatgctaaatgctatagttagaaggttacttcagagaggggagatgccaagggctgggacttatctgtctaaaattgacgaggggagcttcacccttgaagcttccacagctggcttattgactgcgcttgcttcaggggggaaatgtcaggaatataaggggttactgcctgaaaaatatcactcttttctggaacagggcactggt

SEQ ID NO: 1993 - DNA, 2199 bp, Triticum aestivum; identical to SEQ ID NO: 1992

SEQ ID NO: 1994 - DNA, 2145 bp, Triticum aestivum
atgaggcgccgcctcgtccccgtcggcagccgcctctcggagcggaacatcgagcaccggtaccgctccagaaacattggtaccgaggacgcactcaacctgttcgacgaattgatccaggtcgctgggccttcctcggtccgcgccatcaactgcctcctcaccgtcgtcggccgtgattgccccgcaatcggcgtctccctgttcaaccgtgttgcaagagccaaggtgcctccccacaatatcacctatggcattctagtcgactgctgctgccgtgctggccgcttggaccttggacatgctggcatggggcacgtcattaagttgggatttgcagcagaagccatcgtcaatttcagccacctactcaaggccatatgtgcggagaagaagaccagctatgcaatggacattgtactccggataatgcctgaatttaactgcatcccgaacattttctcatacagcattcttttgaagggtctttgcaacgagaagaggagccaagaggctctcgagctgattcacatgatgattgaccatggaggtagctgccaacctaatgtggtgtcctatagcaccgtacttgatggcttgttgaaagagggtgaggtgggcaaggcctacagcctattttgtgtcatgctacagaggggaatttcgccgaatgctgtgacctgcacttcaatcatctctggcatgtgcaaagttcatgcgatggacaaggcagaggaggttcttcaacagatgactaatagaggtattctgccaaatagtgccacatataatagtctgatacatggatattattcattaggatggtgcaaagaggtggatcgaattttgaaggaaatgtctaaaaatggtgttcaaccagatattataacttccaatatacagttggattatctttgcaagagcagaagatgcgcagaagctaggaagatttttgattccatggtcagtttgggccaaaaaccagatgttactacctacagcatactgcttcatgggtatgctatggaaaaatcttttcatgatatgctttgtctcattgatttgatggtaggtaatggtattgcaccaaatcattatgtctacaacatactcatatctgcatatgctaaagaagaaatggttgatgaagtaatgcatatatttacaaaaatgcggcagaaaggattgaaccctgatgcagtgagctatggaacagtaatagacttactttccaggattggtcgaatggatgatgctatgtcccagttcgctcaaatcataactgaagggttagctcctgatatcatagttttcaactcccttattagtggtttctgttcttgtggcaaatgggagaaggttcatgaactattttctgagatgttggatcacggcatctgtcccgacagagtgttcttcaacactgttatggatcacctttgcaaaaatggaagggttatggaagcccaagatgtgttcgacctgatggtacacatgggtgtgaagccttttgtccgtgattacaacacactgatacatggatactgtttagttggtaagatggatgaagggaggaagttacttgacaatatgttctcaattggcttgaaaccggatgatttcacctatagcatactgattgatggttactctaagaagggaaggatagatgatgcattgattattgtcagggaaatgttggacgggaaggttaagccttctattatcacttttaatattatgattggtgcgttgctgaaaggtggcagaaaggaagaagccaaagatttgtttgatggtatctgggccaaaggattagtgcccgatgttgttacatatagcttaatgatacaaaaacttatagaagaaggttctctacaagagtctgatgatctattcatttctatggagaagaatggatgtgctgccgactcccagatgctaaatgctatagttagaagcttacttcagaaaggggaggtgccgagggctgggacttatctgtctaaaattgatgagaggaggttcacccctgaagcttccactgctagcttgttgactgcacttgtgtcagaggggaaaggccaggaatataaggagttactccctgaaaaatatcactcttttctggaacagggcactgat

SEQ ID NO: 1995 - DNA, 2142 bp, Triticum aestivum
atgaggcgccgcctcgtccccgtcggcagccgcctcttggagcggaacatcgagcaccggtaccgctccagaaacattggtaccgaggacgcactcaacctgttcgacgaattgatccaggtcgctgggccttcctcggtccgcgccataaactacctcaccgtcgtcggccgtgattgccccgcaatcggcgtctccctgttcaaccgtgttgcaagagccaaggtgcctccccacaatatcacctatggcattctagtcgactgctgctgccgtgctggccgcttggaccttggacatgctggcatggggcacgtcattaagttgggatttgcagcagaagccatcgtcaatttcagccacctactcaaggccatatgtgcggagaagaagaccagctatgcaatggacattgtactccggataatgcctgaatttaactgcatcccgaacattttctcatacagcattcttttgaagggtctttgcaacgagaagaggagccaagaggctctcgagctgattcacatgatgattgaccatggaggtagctgccaacctaatgtggtgtcctatagcaccgtacttgatggcttgttgaaagagggtgaggtgggcaaggcctacagcctattttgtgtcatgctacagaggggaatttcgccgaatgctgtgacctgcacttcaatcatctctggcatgtgcaaagttcatgtgatggacaaggcagaggaggttcttcaacagatgactgatagaggtattctgccaaatagtgccacatataatagtctgatacatggatattattcattaggatggtgcaaagaggtggatcgaattttgaaggaaatgtctagaaatggtgtccaaccaaatgttgtaacttacaatatacagttggattatctttgcaagagcagaagatgcgcagaagctaggaagatttttgattccatggtcagtttgggccaaaaaccagatgttactacctacagcatactgcttcatgggtatgctatggaaaaatcttttcatgatatgctttgtctcattgatttgatggtaggtaatggtattgcaccaaatcattatgtctacaacatactcatatctgcatatgctaaagaagaaatggttgatgaagtaatgcatatatttacaaaaatgcggcagaaaggattgaaccctgatgcagtgagctatggaacagtaatagacttactttccaggattggtcgaatggatgatgctatgtcccagttcgctcaaatcataactgaagggttagctcctgatatcatagttttcaactcccttattagtggtttctgttcttgtggcaaatgggagaaggttcatgaactattttctgagatgttggatcgcggcatctgtcccgacagagtgttcttcaacactgttatggatcacctttgcaaaaatggaagggttatggaagcccaagatgtgttcgacctgatggtacacatgggtgtgaagccttttgtccgtgattacaacacactgatacatggatactgtttagttggtaagatggatgaagggaggaagttacttgacaatatgttctcaattggcttgaaaccggatgatttcacctatagcatactgattgatggttactctaagaagggaaggatagatgatgcattgattattgtcagggaaatgttggacgggaaggttaagccttctattatcacttttaatattatgattggtgcgttgctgaaaggtggcagaaaggaagaagccaaagatttgtttgatggtatctgggccaaaggattagtgcccgatgttgttacatatagcttaatgatacaaaaacttatagaagaaggttctctacaagagtctgatgatctattcatttctatggagaagaatggatgtgctgccgactcccagatgctaaatgctatagttagaagcttacttcagaaaggggaggtgccgagggctgggacttatctgtctaaaattgatgagaggaggttcacccctgaagcttccactgctagcttgttgactgcactagtgtcagaggggaaaggccaggaatataaggagttactccctgaaaaatatcactcttttctggaacagggcactgat

SEQ ID NO: 1996 - DNA, 2142 bp, Triticum aestivum; identical to SEQ ID NO: 1995

SEQ ID NO: 1997 - DNA, 2145 bp, Triticum aestivum
atgaggcgccgcctcgtccccgtcggcagccgcctcttggagcggaacatcgagcaccggtaccgctccagaaacattggtaccgaggacgcactcaacctgttcgacgaattgatccaggtcgctgggccttcctcggtccgcgccatcaactgcctcctcaccgtcgtcggccgtgattgccccgcaatcggcgtctccctgttcaaccgtgttgcaagagccaaggtgcctccccacaatatcacctatggcattctagtcgactgctgctgccgtgctggccgcttggaccttggacatgctggcatggggcacgtcattaagttgggatttgcagcagaagccatcgtcaatttcagccacctactcaaggccatatgtgcggagaagaagaccagctatgcaatggacattgtactccggataatgcctgaatttaactgcatcccgaacattttctcatacagcattcttttgaagggtctttgcaacgagaagaggagccaagaggctctcgagctgattcacatgatgattgaccatggaggtagctgccaacctaatgtggtgtcctatagcaccgtacttgatggcttgttgaaagagggtgaggtgggcaaggcctacagcctattttgtgtcatgctacagaggggaatttcgccgaatgctgtgacctgcacttcaatcatctctggcatgtggaaagttcatgcgatggacaaggcagaggaggttcttcaacagatgactaatagaggtattctgccaaatagtgccacatataatagtctgatacatggatattattcattaggatggtgcaaagaggtggatcgaattttgaaggaaatgtctaaaaatggtgttcaaccagatattataacttacaatatacagttggattatctttgcaagagcagaagatgcgcagaagctaggaagattttttattccatggtcagtttgggccaaaaaccagatgttactacctacagcatactgcttcatgggtatgctatggaaaaatcttttcatgatatgctttgtctcattgatttgatggtaggtaatggtattgcaccaaatcattatgtctacaacatactcatatctgcatatgctaaagaagaaatggttgatgaagtaatgcatatatttacaaaaatgcggcagaaaggattgaaccctgatgcagtgagctatggaacagtaacagacttactttccaggattggtcgaatggatgatgctatgtcccagttcgctcaaatcataactgaagggttagctcctgatatcatagttttcaactcccttattagtggtttctgttcttgtggcaaatgggagaaggttcatgaactattttctgagatgttggatcacggcatctgtcccgacagagtgttcttcaacactgttatggatcacctttgcaaaaatggaagggttatggaagcccaagatgtgttcgacctgatggtacacatgggtgtgaagccttttgtccgtgattacaacacactgatacatggatactgtttagttggtaagatggatgaagggaggaagttacttgacaatatgttctcaattggcttgaaaccggatgatttcacctatagcatactgattgatggttactctaagaagggaaggatagatgatgcattgattattgtcagggaaatgttggacgggaaggttaagccttctattatcacttttaatattatgattggtgcgttgctgaaaggtggcagaaaggaagaagccaaagatttgtttgatggtatctgggccaaaggattagtgcccgatgttgttacatatagcttaatgatacaaaaacttatagaagaaggttctctacaagagtctgatgatctattcatttctatggagaagaatggatgtgctgccgactcccagatgctaaatgctatagttagaagcttacttcagaaaggggaggtgccgagggctgggacttatctgtctaaaattgatgagaggaggttcacccctgaagcttccactgctagcttgttgactgcacttgtgtcagaggggaaaggccaggaatataaggagttactccctgaaaaatatcactcttttctggaacagggcactgat

SEQ ID NO: 1998 - DNA, 2142 bp, Triticum aestivum; identical to SEQ ID NO: 1995

SEQ ID NO: 1999 - DNA, 1902 bp, Triticum aestivum
atgcctaccgcccgcctgtcctccgtctccgcctcctccttcaaggcttcttcacgaaaaccacgagcccccctcgccgccttggctgctgccacggagcgtgtgcgcgccggaacactaagccaggaggacgcgcaccacctgttcgacgaattgctaggccaagctgccatcgtcccggaacgcgggctgaacaactttcttgccgcactagctcgtgcaccgccctcaggtgcctgcggcgatggccccacccttgccgtcaccctcttcaatcgcatgtcccgaggcgctggtgcacgggtggtgtcgcccacactctgtacctattccatcctcatggactgctgctgccgcgcaggccgcccggacttggtggttgccttctttggccgcctcatcaggttggggctgcgtttggagatcatctccttcagcaatctcctcaaggggctctgccaggccaagtgttcaaatgaggctttggacatgctgctccaccggatgcccgaactagactgtgcgcctcatgtcgtctcgtacaacatagtaatcaacggctgttttaaacaaggtgaagtggagaaagcgtgcaatctctaccgtgagatgatcaacctgggagttcaacctaatgtggtgacctacagctcatttatcaacgcactaagcaagtccggagcaatggacaaggcagaagtggtccttcggcaaatggttgatcaaggcattgcacccaatatcattacgtatactagtctgatccatggatattccacttcgggtcagttgaaagcagcagttagtatattcaaagaaatggcaagtgctggtgttcgaccaaattctgtcacgttgaactcatttattgattccctttgcaagcatagaaagacaaaggaagctagagatatttttgactccatggccgcaaagggccacaaacctgatattttctcctactctactatgcttaatgggtatgcgaaagaaggatgcttcgatgatatgactgatctcttcaattcgatggtacggaatggtatcgtacctgaccaccatgttttcaacatactgatcaatgcatatgctaaacgtggactgatggataaggctatgcacatgttcgaagtaatgaggcaacaaggagtaaacccaaatgtagttgactatggtatacttcttaatggctactgtaaaattggaaggatcgcccatggattgagtcttttcagggaaatgtcactcagcggggttaagcccacgactattatgtacaacattatacttgatgggctgtttcgctccgggagatcagtttctgcaaaggaaaaattcgacatgatgcttgaaagtggcataccagtgaacgttcgcacatacaacatagttctctgtggactttgtaaaaacaattgcactggtgaagcaatggagctgttcaagaaattacgtgcaatgaacgtgcagattgatgtcatgatactcaatactatgatttctgcaatgtttaaaactaggagaattgaagaagccaaggatttgtttgctactatatcagccatcaggttggtgccttctgttgtgacttacagtgtaatgatgacgaatttcataaaagaagggttgctggcagatgctgatgatatgtttttagaaatggagaaggctggatgtgctcccaactccagtctgctaaatcaagtggtcagggcgttgctggaaaaaggtgcagttgtaaaggctgcaacttatctcgctaaacttgatgctaaacagctgtcagttgaagcttcaacgattttgttaatagtatctctcttctcaggggaagggaaactaagggagcacatagagttgcttccagtaaagtaccagcctcctgagagttcgactgacaat

SEQ ID NO: 2000 - DNA, 2187 bp, Triticum aestivum
atggtcccgccctcgccgtcgccctcttcaaccgcgtgtgccgagaacaagccggcccgcgggtggcacctcacagtccacacctacggcatcctcatggactgctgctgccgcgcgtctcgcccggacctagggcttgccttctttggtcgcctcctcaggacgggcctcaagacaaatgagatcgtcgccagcaccttcctcaagtgcctctgctacacgaaacggacagaagaggctgggaacttgctgcttcataggatgcccgagctctgctgtgtgcctgatgccttctcatacaacattgttctgaagagcttatgtgacaatagcatgagtcagcgggggcttgacctgctccagatgatggcgaaagaaggaggtggctgctctcccaacgtggtggcatatagcacggtcatccatggcttctttaaggagggcgaaacaggcaaggcatgcaatctcttccatgaaatgatgcagcaaggtgttgtgcccaatgtgtggacgtatagctcgattattgatgcattgtgcaaggccagagcaatggacaaggcagagctagcccttcagcagatggttgccaatggtgctcaacccaatgaagtgacatataattgcatgatccatgggtattccacatccgggcggttgaaagaggctgctaaaatgttcagagaaatgaaaagccggggtcttacaccaaatattgttacctgcggctcgttaatgacttccctttgcaagcatggaagaagcaaagaagctagagaaatatttgattccatgactgccaaaggccacagagctgatgtcgtctcatactctattttgcttcatgggtatgccaatgaaggatgctttgctgatatgattgatctctttaattcaatggaaagcaacggtattgcagccgactgccgtgtttttaccatattaattgatgcctatgctaaacgtggaatgatggatgatgcaatgcacatatttacggaaatgcagcaacaaggtgtgagtccaaatgttgtcacatattcaactgtaatatcagcactttctagaatgggtaggttgaccgattctatggaaaaatttaatcagatggttgccttgggagtacagccggatagagctatttatcggtccctaattcagggcttttgtatgcatggtggtttggttaaagataaggagttggtttctcaaatgataaacaaaggtattcctcgtcctagcattgtgttcttcaattcagtaataaacagtatgtgcaaggaaggaagggttatggatgcacatgatatctttgacttggttatagacattggtgagaggcctgatgacattacatttaattcactgattgacggatattgcttagtcgggaagatggataaagcatttaaaatactcgatgccatggaatcagttggtgttcagcctaatattgttacttacaacacacttcttgatggctattttaaaaatggaaggatcaatgatggtttgactctgtttagagaaatgccgcgtaagagaattaaacctgacactgttacatatggcatcatgttggatgggttgtttcgtgctgggagaactgttgctgcaaggacaatgttccatgagatgatcgaaagtggaataacagtggacatccccacatacaatatagttcttaggggactttctagaaataactgcacagatgaagcaatcgccctgttccagaaattaggtgcaatgagtgtgaagttcaatatttcaatatttaataccatgatcgatgcaatgtacaaggttcggagaagagaagaagccaatgatttatttgctgcaatatcagccagtgggttggtgcccaaggaatctacttatgcagtaatgataataaatcttctaaaacatggagcagtggaagaagcagacaatatgttttcatcaatggagaaaactggtatagtccccagctcccgtctattaaattgtatcatcagaatgttgttggaaataggtgagattgccaaggccggaaattacttgtctaaacttgatgggaacagcatctcactcgaagcttcaactacttcattgatgttgtctctgttttcaaagaaagggaaatatcatgaggacatgaaattgctccctgcaaagtatcaatttttcgatggatgtagt

SEQ ID NO: 2001 - DNA, 2148 bp, Triticum aestivum
atgttttctgttttcatttttgctttagttttttacgttcacctcgccatcgccctcttcaaccgcatgtgtcgagagcaatccggcccgcgggtggtgcctctcacagtccacacgtacaacatcctcatggactgctgctgccgcgcgtctcgcccggacctaggtcttgccttcttcgctcgcctcctcaggacaggcctgaagacaaacgagatcaccgccaacaccttcctcaagtgcctctgctacgcaagacggacggatgaggctctgaacgtgctgcttcataggatgttcgagctcggctgtgtgcctgatgccatctcatacaacattgttctgaagagcttatgtgaagatagcatgagtcagcgggcgctcgacctcctccagatgatggcgaaagaaggaggtggctgctcccccaacgtggtggcgtatagcacggtcatccatggcttttttaaggaaggtgaaacaggcaaggcatgcaatctgttccatgaaatgatgcaccaaggtgttgagcccagtgtgtggacatatagctcaatcattgatgcattgtgcaaggccagagcaatggacaaggcagagctagtgcttcagcagatggttaacaaaggtgttctacccaataatgtgacatataattgcatgatccatggatattccacatctgggcagtggaaagaggctgctaaattgcttagagaaatgaaaagccgggaccttataccagatattgtcactcgcaactcgttcctggcctccctttgcaagcatgggagaagcaaggaagctgcagaatttcttgattccatgactgccaagggccacaaaccagatatcgtatcataccgtattttgtttcatgggtatgccagtgaaggatgcttcgctgatatgattgatctctttaattcaatggaaagcaacggtattgcagctgactgccatgttttcaacatattaattagtggatatgcaaaacgtggaatgacagaagaagctatgctgatatttactgaaatgcggggacaaggagtgagtccagatgtagtcacctattccattgtaatagccgcactttccagaatgggtaggctgaccgatgctattgagaaattcaatgagatgactgccttggaagtacatccggacacaactgtttatcactcactgattcagggttgttgcatagacggtgatttggttaaagctaaggagctgatgcttgaaatgatgaacggtggtattcttcggcctaacattgtgttcttcaattcagtaataaatagtctgtgcaaagaaggaagggttatggatgcacatgatgtcttagacttggttataggcataggtgagaggcctgataccattacatttagttcactgattgacggatattgcttagtcgggaagacggataaagcattcaaaatacttgatgccatggaatcagttggtgttgagcctgatattgttacttacaatacactgcttgatggctattttaaaaacagaaggattgatgatgctttgactttgtttagagaaatgccgcgtaagagaattaaacctggcactgttacatatggcatcatgttggatgggttgtttcgtgctgggagaactgttgccgcaaagaaaatgttccatgagatgaacgggagtggaacaacggtggacatttccacatacgctataatacttggaggtttttgtagaaataattgtgcagacgaagctatcaccctgttccacaaattaggtgcaatgaatgtgaagttcaatattgcaatagtcaataccatgatcaatgcaatgtacaaggttgggagaagagaagaagctaaggaactatttgctggaatattagcccgtgggttggtgcctaatgaatctacttacggagtaatgataaaaaatcttctaaaagatggagcagtggaagatgctaacaatgtgttttcatcaatggacaagagtggtatagtccccagctcccgtctcatcaatgacatcatcagattgttgttggaaaaaggcaacgaaaaaaatagcgcgctacaaaatatagcgaggcccttctccaaatgctacacaagttatagcgcgctaatagcatgctatatttcgaaa

SEQ ID NO: 2002 - DNA, 2148 bp, Triticum aestivum
atgttttctgttttcatttttgctttagttttttacgttcacctcgccatcgccctcttcaaccgcgtgtgtcgagagcaatccggcccgcgggtggtgcctctcacagtccacacgtacaacatcctcatggactgctgctgccgcgcgtctcgcccggacctaggtcttgccttcttcgctcgcctcctcaggacaggcctgaagacaaacgagatcaccgccaacaccttcctcaagtgcctctgctacgcaagacggacggatgaggctctgaacgtgctgcttcataggatgtccgagctcggctgtgtgcctgatgccatctcatacaacattgttctgaagagcttatgtgaagatagcatgagtcagcgggcgctcgacctcctccagatgatggcgaaagaaggaggtggctgctcccccaacgtggtggcgtatagcacggtcatccatggcttttttaaggaaggtgaaacaggcaaggcatgcaatctgttccatgaaatgatgcaccaaggtgttgaacccagtgtgtggacatatagctcaatcattgatgcactgtgcaaggccagagcaatggacaaggcagagctagtgcttcagcagatggttaacaaaggtgttctacccaataatgtgacatataattgcatgatccatggatattccacatctgggcagtggaaagaggctgctaaattgcttagagaaatgaaaagccaggaccttataccagatattgtcactcgcaactcgttcctggcctccctttgcaagcatgggagaagcaaggaagctgcagaatttcttgattccatgactgccaagggccacaaaccagatatcgtatcataccgtattttgtttcatgggtatgccagtgaaggatgcttcgctgatatgattgatctctttaattcaatggaaagcaacggtattgcagctgactgccatgttttcaacatattaattagtggatatgcaaaacgtggaatgacagaagaagctatgctgatatttactgaaatgcggggacaaggagtgagtccagatgtagtcacctattccattgtaatagccgcactttccagaatgggtaggctgaccgatgctattgagaaattcgatgagatgactgccttggaagtacatccggacacaactgtttatcactcactgattcagggttgttgcatagacggtgatttggttaaagctaaggagctgatgcttgaaatgatgaacggtggtattcttcggcctaccattgtgttcttcaattcagtaataaacagtctgtgcaaagaaggaagggttatggatgcacatgatgtcttagacttggttataggcataggtgagaggcctgataccattacatttagttcactgattgacggatattgcttagtcgggaagacggataaagcattcaaaatacttgatgccatggaatcagttggtgttgagcctgatattgttacttacaatacactgcttgatggctattttaaaaacagaaggattgatgatgctttgactttgtttagagaaatgccgcgtaagagaattaaacctggcactgttacatatggcatcatgttggatgggttgtttcgtgctgggagaactgttgccgcaaagaaaatgttccatgagatgaacgagagtggaacaacggtggacatttccacatacgctataatacttggaggtttttgtagaaataattgtgcagacgaagctatcaccctgttccacaaattaggtgcaatgaatgtgaagttcaatattgcaatagtcaataccatgatcaatgcaatgtacaaggttgggagaagagaagaagctaaggaactatttgctggaatattagcccgtgggttggtgcctaatgaatctacttacggagtaatgataaaaaatcttctaaaagatggagcagtggaagatgctaacaatgtgttttcatcaatggacaagagtggtatagtccccagctcccgtctcatcaatgacatcatcaaattgttgttggaaaaaggcaacgaaaaaaatagcgcgctacaaaatatagcgaggcccttctccaaatgctacacaagttatagcgcgctaatagcatgctatatttcgaaa

SEQ ID NO: 2003 - DNA, 2148 bp, Triticum aestivum; identical to SEQ ID NO: 2001

SEQ ID NO: 2004 - DNA, 2148 bp, Triticum aestivum; identical to SEQ ID NO: 2001

SEQ ID NO: 2005 - DNA, 2148 bp, Triticum aestivum; identical to SEQ ID NO: 2002

SEQ ID NO: 2006 - DNA, 2148 bp, Triticum aestivum; identical to SEQ ID NO: 2001

SEQ ID NO: 2007 - DNA, 2199 bp, Triticum aestivum
atgtcccgcctccgccactccacctccaccgcgccgatgtttcacctccgcctcctccgctgccgcttctcctccatccccatctctccgccctcgcgctcatggtctcccgtcaccgcctttgccgcggccacagagcgcgtcagcgctgggacgctcagcccggaagacgcacaccgcctgttcgacgaattgctacggcaggccactccggtccccgcgcgctccctgaacggcttacttacggccctctcccgtgcgccggacaccggcgcctgcagagacggccccgccctcgccctcgccctcttcaaccgcacccgccgagaagaggccggctcctgggtggtgccgtccacaatcttcacctacggcatcctcatgaactgctgctgccgcacgcgtcgtccggaacttgggcttgccttctttgggcgcgtcctcaggatgggcctgaggacaaacgtggtcgtcgccaccacggtcctccagtgcctgtgcggcgccaaacggacagatgaggctgtggacatcctgctacatcggatgtccgagctcgggtgcgtgcctgacgacttctcatacaacattgttctgaagagcttatgcgatgatagcaggagccagcgggcactcgacctgctccggatgtgggagaatgaacgaggtgtctgctcccccaacgtatatacgtataacacggtcatccacggcttctttaaggaaggtgaagtaagcaaggcatgtaacctattccatgaaatggcgcagaaaggggttccgcccaatgtggtgacatatagcttgactattgatgcgctgtgcaaggccagagctatggacaaagcacagttgttcctccggcagatgattcataaaggtgttcgaccgaacaatgtgacatataatgtcatgatccatggatattgcactctgggacagtggaaggaagcgggtaaaatgttcagagaaatgacaagacagggtctcataccagatattgttacttggacctcgttcatggcctctctctgtaagcatggaagaaccaaagaagctgccgaattctttgattccatgactgccaagggccacaagcctgatttggtcatgtatcatgttctgctccatgggtatgcaaccgaaggatgctttgctgatatgattaatctctttaattcaatggcaaccaaaggtattgtacccgatcgtcaggttttcaacattttaattgatgcacatgctaaacatggaatgatggatgaagctatgcacatatttactggaatgcagggacaaggagtgtgtccagatgtagggacctattcaactctaatatctgcactttgcagaatgggtaggctggctgatgccatggataacttcagtcagatgattggtaagggagtacaaccgaacacagttgtttatcactccctaattcagggtttctctacacatggtgatttgaggaaagcaaaggagttggtttatgaaatgacgaataaaggtattccttgtccaaacattgcattcttcagttctataatggacagtctatgcaaagaaggaagggttatggatgcacatgatatcttccacttggttacagacataggtctgaaacctaacatcattacgtttaatacgctgattgatggacattgcttagtcggtgagatggagaaagcatttggagtacttgattccatggtatcagctggcattgaggctgatgtttttacatataatacacttgcttatggctattgtagatgtggaaggattgatgatgggttgattctattcagagaaatgttgcaaaacaaacctaaacccacaacaatcacatataacatcatactggatgggttatttcgtgctgggagaacatttgctgcaaagaaaatgttccttgagatgattgaaacgggaataacagtgagcatttccacatacagtataatacttggaggactttgtaggaataattgctctgacgaagcgatcaccctatttcagaaattaggagcaatgaatgtgaagtttgatattaaaatactcactaccatgatcaatgccatgttcaaggtttggagaagagaagaagctaacggtttgtttgctgcaatatcagccagtgggatggtacctaatgctgataggaaatcttctaaaagaaggatcagtggaagaagc

SEQ ID NO: 2008 - DNA, 2199 bp, Triticum aestivum
atgtcccgcctccgccactccacctccaccgcgccgatgtttcacctccgcctcctccgctgccgcttctcctccatccccatctctccgccctcgcgctcatggtctcccgtcaccgcctttgccgcggccacagagcgcgtcagcgctgggacgctcagcccggaagacgcacaccgcctgttcgacgaattgctacggcaggccactccggtccccgcgcgctccctgaacggcttacttacggccctctcccgtgcgccggacaccggcgcctgcagagacggccccgccctcgccctcgccctcttcaaccgcacccgccgagaagaggccggctcctgggtggtgccgtccacaatcttcacctacggcatcctcatgaactgctgctgccgcacgcgtcgtccggaacttgggcttgccttctttgggcgcgtcctcaggatgggcctgaggacaaacgtggtcgtcgccaccacggtcctccagtgcctgtgcggcgccaaacggacagatgaggctgtggacatcctgctacatcggatgtccgagctcgggtgcgtgcctgacgacttctcatacaacattgttctgaagagcttatgcgatgatagcaggagccagcgggcactcgacctgctccggatgtgggagaatgaacgaggtgtctgctcccccaacgtatatacgtataacacggtcatccacggcttctttaaggaaggtgaagtaagcaaggcatgtaacctattccatgaaatggcgcagaaaggggttccgcccaatgtggtgacatatagcttgactattgatgcgctgtgcaaggccagagctatggacaaagcacagttgttcctccggcagatgattcataaaggtgttcgaccgaacaatgtgacatataatgtcatgatccatggatattgcactctgggacagtggaaggaagcgggtaaaatgttcagagaaatgacaagacagggtctcataccagatattgttacttggacctcgttcatggcctctctctgtaagcatggaagaaccaaagaagctgccgaattctttgattccatgactgccaagggccacaagcctgatttggtcatgtatcatgttctgctccatgggtatgcaaccgaaggatgctttgctgatatgattaatctctttaattcaatggcaaccaaaggtattgtacccgatcgtcaggttttcaacattttaattgatgcacatgctaaacatggaatgatggatgaagctatgcacatatttactggaatgcagggacaaggagtgtgtccagatgtagggacctattcaactctaatatctgcactttgcagaatgggtaggctggctgatgccatggataacttcagtcagatgattggtaagggagtacaaccgaacacagttgtttatcactccctaattcagggtttctctacacatggtgatttgaggaaagcaaaggagttggtttatgaaatgacgaacaaaggtattccttgtccaaacattgcattcttcagttctataatggacagtctatgcaaagaaggaagggttatggatgcacatgatatcttccacttggttacagacataggtctgaaacctaacatcattacgtttaatacgctgattgatggacattgcttagtcggtgagatggagaaagcatttggagtacttgattccatggtatcagctggcattgaggctgatgtttttacatataatacacttgcttatggctattgtagatgtggaaggattgatgatgggttgattctattcagagaaatgttgcaaaacaaacctaaacccacaacaatcacatataacatcatactggatgggttatttcgtgctgggagaacatttgctgcaaagaaaatgttccttgagatgattgaaacgggaataacagtgagcatttccacatacagtataatacttggaggactttgtaggaataattgctctgacgaagcgatcaccctatttcagaaattaggagcaatgaatgtgaagtttgatattaaaatactcactaccatgatcaatgccatgttcaaggtttggagaagagaagaagctaacggtttgtttgctgcaatatcagccagtgggatggtacctaatgctgataggaaatcttctaaaagaaggatcagtggaagaagc

SEQ ID NO: 2009 - DNA, 2199 bp, Triticum aestivum; identical to SEQ ID NO: 2008

SEQ ID NO: 2010 - DNA, 2199 bp, Triticum aestivum; identical to SEQ ID NO: 2008

SEQ ID NO: 2011 - DNA, 2199 bp, Triticum aestivum
atgtcccgcctccgccactccacctccaccgcgccgatgtttcacctccgcctcctccgctgccgcttctcctccatccccatctctccgccctcgcgctcatggtctcccgtcaccgcctttgccgcggccacagagcgcgtcagcgctgggacgctcagcccggaagacgcacaccgcctgttcgacgaattgctacggcaggccactccggtccccgcgcgctccctgaacggcttacttacggccctctcccgtgcgccggacaccggcgcctgcagagacggccccgccctcgccctcgccctcttcaaccgcacccgccgagaagaggccggctcctgggtggtgccgtccacaatcttcacctacggcatcctcatgaactgctgctgccgcacgcgtcgtccggaacttgggcttgccttctttgggcgcgtcctcaggatgggcctgaggacaaacgtggtcgtcgccaccacggtcctccagtgcctgtgcggcgccaaacggacagatgaggctgtggacatcctgctacatcggatgtccgagctcgggtgcgtgcctgacgacttctcatacaacattgttctgaagagcttatgcgatgatagcaggagccagcgggcactcgacctgctccggatgtgggagaatgaacgaggtgtctgctcccccaacgtatatacgtataacacggtcatccacggcttctttaaggaaggtgaagtaagcaaggcatgtaacctattccatgaaatggcgcagaaaggggttccgcccaatgtggtgacatatagcttgactattgatgcgctgtgcaaggccagagctatggacaaagcacagttgttcctccggcagatgattcataaaggtgttcgaccgaacaatgtgacatataatgtcatgatccatggatattgcactctgggacagtggaaggaagcgggtaaaatgttcagagaaatgacaagacagggtctcataccagatattgttacttggacctcgttcatggcctctctctgtaagcatggaagaaccaaagaagctgccgaattctttgattccatgactgccaagggccacaagcctgatttggtcatgtatcatgttctgctccatgggtatgcaaccgaaggatgctttgctgatatgattaatctctttaattcaatggcaaccaaaggtattgtacccgatcgtcaggttttcaacattttaattgatgcacatgctaaacatggaatgatggatgaagctatgcacatatttactggaatgcagggacaaggggtgtgtccagatgtagggacctattcaactctaatatctgcactttgcagaatgggtaggctggctgatgccatggataacttcagtcagatgattggtaagggagtacaaccgaacacagttgtttatcactccctaattcagggtttctctacacatggtgatttgaggaaagcaaaggagttggtttatgaaatgacgaacaaaggtattccttgtccaaacattgcattcttcagttctataatggacagtctatgcaaagaaggaagggttatggatgcacatgatatcttccacttggttacagacataggtctgaaacctaacatcattacgtttaatacgctgattgatggacattgcttagtcggtgagatggagaaagcatttggagtacttgattccatggtatcagctggcattgaggctgatgtttttacatataatacacttgcttatggctattgtagatgtggaaggattgatgatgggttgattctattcagagaaatgttgcaaaacaaacctaaacccacaacaatcacatataacatcatactggatgggttatttcgtgctgggagaacatttgctgcaaagaaaatgttccttgagatgattgaaacgggaataacagtgagcatttccacatacagtataatacttggaggactttgtaggaataattgctctgacgaagcgatcaccctatttcagaaattaggagcaatgaatgtgaagtttgatattaaaatactcactaccatgatcaatgccatgttcaaggtttggagaagagaagaagctaacggtttgtttgctgcaatatcagccagtgggatggtacctaatgctgataggaaatcttctaaaagaaggatcagtggaagaagc

SEQ ID NO: 2012 - DNA, 2199 bp, Triticum aestivum; identical to SEQ ID NO: 2011

SEQ ID NO: 2013 - DNA, 2148 bp, Triticum aestivum
atgagccgccgccttgtccccgtcggcagacgcatcttggagcagaacatcaaggaccggtaccgcaccggacacattggcaccgaggatgcactccagctgtttgacgaattgctccaggttgctcagccctcctcgattgctgccatcaactgcctcctcactgtcgtcggccgtgattgccctgcgctcggcgtctcgctcttcaaccgcgtcgcaaggtccaaggtggcgcccagcagtatcacctatgccattctggtcgactgctgctgccgcgctggccgccaggaccttggacacactgccatgggacacgtcatcaagatgggatttcttgcagatgctattatcactttcagccacctactaaaggccatctgtgcggagaacaagaccagctacgcaatggacatcgtactccgagtaatgcccatgtttaactgtgttccgagcattttctcctacagcattcttttcaagggtctctgcaatgagaggagaagccaagaggctcttgagctgattaacattatggttgaggatggacgaggtagctgccaacctaatgtcgtgtcctataccaccgtaattgatggcttgttgaaagagggtgaggtgggcaaggcctacagcctattttgtgtcatgctacagaggggaatttcgccgaatgttgtgacctgcacttcaatcatctctggcatgtgcaaagttcatgcgatggacaaggcagaggaggttcttcaacagatgactaatagaggtattctgccaaatagtgccacatataatagtctgatacatggatattattcattaggacagtgcgaagaggtggatcggattctcatggaaatgtctagaaatggtgttcaaccaaatgttgtaacttacaatatacagatggattatctttgcaagagcggaagatgtgcagaagctaggaagatttttgattctatgatcagtttgggcccaaaaccgaccattactacctacaacattctgcttcatgggtatgctatggaaaaatcttttcatgatatgcattctctcattgatttgatggtaggaaatggcattgcaccagatcattatgtctacaacatactcatatctgcatgtgctaaagaagaaatggttagtgaggtaatgcatatatttaaaaaaatgcggcagcatgggttgaaccctgatgtagcgacctatggagcggtagtaaacttgctttgcagcatgggccgaatggatgatgctatgtaccaatacaatcaaatgataaccgaaggattagctcctgatatcatagttttcagcacccttataagtggtttctgtacttgtggcaaatgggagaaggttcatgaactattttctgagatgttggatcgcggtatctgtcccaacacagtgttcttcaccacaattatggaccgcctttgcaaaaacggaagggttatggaagcccaagatctcttcgacctgatggtacacatgggtgtgaagcctgatgtgtgtacttataacacactgataggtggattcttgttcattggtaagatggatgaagtgaggaagttacttgacaatatggtctcaattggcatgaaaccagatgttatcacctataacatactgattgatggttactgtaagaatggaaggatagatgatgcattggttgttttcagggaaatgttggccgggaaggttaagccttgcattatcacttttaatattatgcttggtgcgttgcttaaaggtggcaggaaggaagaggctaaagatttgtttgatggtatctgggccaaaggattagtgcccaccgttgttacatatagcttaatgatacaaaaacttatagaagaaggatctctacaagagtctgatgatctattcctttctatggagaagaatggttgtcctgccaattcccgcatgctaaatgctatagttagaaggttacttcagaaaggggagatgcccagggctgggacttatttgtctaaaattgatgagaggagtttcaccattgaagcttccacagctagcttgttgactgcacttgcttcagtggggaaatgtcaggaatataaggggttactgcctgaaaaatatcactcttttctggaacagggcactgat

SEQ ID NO: 2014 - DNA, 2148 bp, Triticum aestivum
atgagccgccgccttgtccccgtcggcagacgcatcttggagcagaacatcaaggaccggtaccgcaccggacacattggcaccgaggatgcactccagctgtttgacgaattgctccaggttgctcagccctcctcgattgctgccatcaactgcctcctcactgtcgtcggccgtgattgccctgcgctcggcgtctcgctcttcaaccgcgtcgcaaggtccaaggtggcgcccagcagtatcacctatgccattctggtcgactgctgctgccgcgctggccgccaggaccttggacacactgccatgggacacgtcatcaagatgggatttcttgcagatgctattatcactttcagccacctactaaaggccatctgtgcggagaacaagaccagctacgcaatggacatcgtactccgagtaatgcccatgtttaactgtgttccgagcattttctcctacagcattcttttcaagggtctctgcaatgagaggagaagccaagaggctcttgagctgattaacattatggttgaggatggacgaggtagctgccaacctaatgtcgtgtcctataccaccgtaattgatggcttgttgaaagagggtgaggtgggcaaggcctacagcctattttgtgtcatgctacagaggggaatttcgccgaatgttgtgacctgcacttcaatcatctctggcatgtgcaaagttcatgcgatggacaaggcagaggaggttcttcaacagatgactaatagaggtattctgccaaatagtgccacatataatagtctgatacatggatattattcattaggacagtgcgaagaggtggatcggattctcatggaaatgtctagaaatggtgttcaaccaaatgttgtaacttacaatatacagatggattatctttgcaagagcggaagatgtgcagaagctaggaagatttttgattctatgatcagtttgggcccaaaaccgaccattactacctacaacattctgcttcatgggtatgctatggaaaaatcttttcatgatatgcattctctcattgatttgatggtaggaaatggcattgcaccagatcattatgtctacaacatactcatatctgcatgtgataaagaagaaatggttagtgaggtaatgcatatatttaaaaaaatgcggcagcatgggttgaaccctgatgtagcgacctatggagcggtagtaaacttgctttgcagcatgggccgaatggatgatgctatgtaccaatacaatcaaatgataaccgaaggattagctcctgatatcatagttttcagcacccttataagtggtttctgtacttgtggcaaatgggagaaggttcatgaactattttctgagatgttggatcgcggtatctgtcccaacacagtgttcttcaccacaattatggaccgcctttgcaaaaacggaagggttatggaagcccaagatctcttcgacctgatggtacacatgggtgtgaagcctgatgtgtgtacttataacacactgataggtggattcttgttcattggtaagatggatgaagtgaggaagttacttgacaatatggtctcaattggcatgaaaccagatgttatcacctataacatactgattgatggttactgtaagaatggaaggatagatgatgcattggttgttttcagggaaatgttggccgggaaggttaagccttgcattatcacttttaatattatgcttggtgcgttgcttaaaggtggcaggaaggaagaggctaaagatttgtttgatggtatctgggccaaaggattagtgcccaccgttgttacatatagcttaatgatacaaaaacttatagaagaaggatctctacaagagtctgatgatctattcctttctatggagaagaatggttgtcctgccaattcccgcatgctaaatgctatagttagaaggttacttcagaaaggggagatgcccagggctgggacttatttgtctaaaattgatgagaggagtttcaccattgaagcttccacagctagcttgttgactgcacttgcttcagtggggaaatgtcaggaatataaggggttactgcctgaaaaatatcactcttttctggaacagggcactgat

SEQ ID NO: 2015 - DNA, 2148 bp, Triticum aestivum; identical to SEQ ID NO: 2014

SEQ ID NO: 2016 - DNA, 2148 bp, Triticum aestivum; identical to SEQ ID NO: 2014

SEQ ID NO: 2017 - DNA, 1836 bp, Triticum aestivum
atgggacacgtcattaagttgggatttacagcagaagctatcgtcaatttcagccacctactcaaggccatctgtgcagtgaagaagaccagctatgcaatggacatcgtactccggataatgcctgagtttaactgcataccaaacattttctcctataacattcttttcaagggtctctgcaacgagaagagaagccaagaggctctcgacctgattcgcatcatggttgagcatggaggttgctgccaacctgatgtggtgacctataacactgtaatcgatggcttgttgaaagagggtgaggtaggcaaggcttacagcctattttgtgaaatgctgcgtcagggggtatcgccggatgttgtgacctgtagttcgattatctctggcatgtgcaagcttcatgcaatggacaaggctgaggaggttcttcaacagatgcttgatagaagaattctgccagatgttgccacatataatagtctgatacatggatattattcattaggacagtgcgaagaggtggatcggattttcaaggagatgactacaaatggtgttcaaccagatattgtaacttacaatatacagatggattatctttgcaagaatggaagatgcgcagaagctaggaagatttttgattctatgatcagtttgggccaaaaacctactgttactacctacaacattctgcttcatgggtatgctatggaaagatcgtttcatgatatgaattgtctcattgagttgatggatgataatggtatttcaccagatcattatggctacaacatactcatatctgcttatgctaaagaaaaaatggttgatgatgtattgcatatatttacaaaaatgcggcagcaaggattgaaccctgatgttgcgaactatggagcggtaataaacttgctttctagtattggccgaatggatgatgctatgtcccaatacaatcaaatgataaatgaaggattactccctggtatcatacttttcagccaacttattagtggtttctgttcttgtggcaaatgggagaaggttcatgaactattttctgagatgttggatcgcggcatctgtcccaacacagtgttcttcaacacaattatcgaccgcctttgcaaaaacggaagggttatggaagcccaagatctcttcgacctgatggtacacatgggtgtgaagcctgatgtgtgtaattataacacattgataggtggatacttgttcattggtaagatggatgaagtgagcaagttacttgacaatatgtgctcaattggcttgaacccaaatgttttcacctatggcatactgatcgatggttactctaagaatggaagtataggtgatgcattggttgtttttagggaaatgttggaagggaaggttaagccttctattatcagttttaatattatgattggtgcgttgcttaaatgtggcaggaaggaagaagccaaagatttgtttgatggtatctgggccaacgtattagtgcctgatgttgttacctatagattaatgatacacaaacttatagaagaaggttctctacaagagtctgatgatctatttgtttctatggagaaggatggctgtgctgccgactcccgtatgctaaatgccatagttagaaggttacttcagaaaggggagatgccaagagctgggacttatctgtctaaaattgatgagaggaggttcacccttgaagcttccactgctagcttgttgactgcacttgtgtcaggggggaaaggccaggaatataaagagttactccccaaaaaataccaatcttttctggaacagggcactgat

SEQ ID NO: 2018 - DNA, 2142 bp, Triticum aestivum
atgagccgccggcttgtccccgtcggtagacgcatcttggagaggaaaattgaagaacggtactgtgccggagacattggcactgacgatgcactcaacctgttctacgaattgatccaggttgctcggccttcctcgatccgtgccattaactgcctcctcaccgtggtccgccgtgattgccctgcgctcggcgtttccctcttcaaccgtgttgcaagagccaaggtgcctccacacaatatcacctatggcattctagtcgactgctgctgccgtgctggccgcttggaccttggacacgctgccatgggacacgtcattaagttgggatttgcagcacaagctgtcgtcaatttcagccacctactcaaggccatctgtgcggagaagaagaccagctatgcaatggacatcgtactccgagtaatccccatgtttaactgcgtgccggatgtcttctcctacagcattcttttcaagggtctttgcaacgaaaggagaagccaagaggctcttgagctgattcacatcatggtacagcatggaggtagctgccaacctaatgtggtgtcctatagcaccgtaattgatggcttgttgaaagagggtgagatgaacaaggcttacagtctattttgtgaaatgttacagaggggaatttcgccgaatgttgtgacctgtagttcaattatctctggcatgtgcaagcttcatgcaatggacaaggctgaggaggttcttcaacagatgcttgatagaggaattctgccaaatagtaccacatataatggcctgatacatgggtattattcactagaacagtgcgaagaggtgggtcggattttcaaggaaatgtctagaaatggtgttcaaccaaatattgtaacttacaatatacagatggattatctttgcaagagcggaagatgcgcagaagctaggaagatttttgattctatggtcagtttgggccaaaaaccagatgttactacctacggcattctgcttcatgggtatgctatggaacgatcttttcatgatattcattgtctcattgatttgatggtcggaaatggtctgtcaccaaataactatatctacagcatactcatatctgcatgtgctaaagaaaaaatggttgatgaggcaatgcatatatttacaaaaatgcggcagcaaggatttaaccctgatgtagtgagctatggaatggtgatagacttgctttccagtattggccgaatggatgatgctatgtcccagttcaatcaaatgataaccgaagggttagctcctgatatcatagttttcaacccccttattagtggtttctgttcttgtggcaaatgggagaaggttcatgaactattttctgagatgttggatcgcagcatctgtcccgacagagtgttcttcaacactgttatggatcacctttgcaaaagtgaaagggttatggaagcccaagatgtgcttgacctgatgatacatatgggtgtgaagcctgttgttcgtgattacaacagactgatacatggatattttttagttggtaagatggatgaagggaggaagttacttgacaatatgtgctccattggcttgaaaccgaatgttgtcacctataacatactgatagatggttactctaagaatggaaggatagatgatgcattggttgttttcagggaaacgttggacaatgttaaggtttctgttatcacttttactattatgatcggtgcgttgcttaaatgtggcagaaaggaagaagccaaagacatgtttgatggtatctgggccaacggattagtgcctgacgttgttacatatagcttaatgatacaaaaacttatagaagaaggttctctacaagagtctgatgatctattcatttctatggagaagaatggatgtgctgccgattcccgtttgctaaacgctatagttagaagcttacttcagaaaggggagattcttagggctgggacttatctgtctaaaattgatgagaggagcttcacccttgaagcttccacagctagtttgttgactgcacttgcttcaggggggaaaggccaggaatataaggagttactccctgaaaaataccactcttttctggaacagggcacggat

SEQ ID NO: 2019 - DNA, 2142 bp, Triticum aestivum; identical to SEQ ID NO: 2018

SEQ ID NO: 2020 - DNA, 2172 bp, Triticum aestivum
atgggtttgggaaggcaaaacccgatgggtttcgtccccgttgccatctggagccgcactagcccgtgctccgccctcagctgcctgcagcgatggccccggccttgccgtcaccctcttcaaccgcatgtgccgaggcgctggtgcactcgtgtggtctcgcccacgtgttgtacctattccatcctcatggactgctgctgccgcgcagaccgcccggacttggtggttgccttcttcggccacctcctcaggctggggctgcgcctgaatgtcatctccttcaacaacctcctcaaggggctctgccaggccaagcgctcaaatgaggcggtggacttgctgctccaccggacacctgaactggactctgtgcctaatgtcttctcgtacggcatcgtaatcaacggctgttttaaacaaggtgaagtagacaaagcgtgcaatctcttccatgagatgatccaactaggagttcaacctaatgtggtgatctacacctcaattatcgatgcactaagcaagtgcggagccatggataaggcagaagtggtccttcagcaaatggttgatcaaggcattgaacccaacatcaggacatatactagcctggtacatggatattccgcttcgggtcagtggaaggcggcagttagagtattcaaggaaatggtaagtgttggtattctaccaaatgctttcactttgaactcatttatggattcactttgcaagcatagaaggacaaaggaagctagagttatttttgactccatggctgcaaagggccaaaaacctaatatcgtctcctactctactatgcttaacgggtatgcgaaagaaggatgcttcgatgatatgacttgtttcttgaatttgatgctacagaatggtgttgtacctgatcaccatgttttcaacatattgattaatgcatgtgctaaacgtggactgatggatgaggctatgcacatgtttgaagtaatgaggcaacaaggagtaaacccagatgtatttggctatcaaatcataatggattcactttgcaaaaagggtaagatggatgctgctctggagaaatttaatcagatggtcaatgaaggagtttcacctaacaaagctgtttaccaatgcctggttctgggttcttgctctcatgatcattttctgaaagccaaggaattgatttctgaagcagttaatagaggtctgtgttctaacagtgcgttcttctatcctgtaataaacgacctgtgcaaagaaggaaaggtgaaggaggcacaggatatgtttgacttcattgtaggtattggtcagcggcctgatgtgattatgtacaattcactgatggatggatattgccttgttggcaaagtggaggaagcactgagagtacttgatgctatgaagtctgctggcctccaacctactgctgttacgtatgatatacttcttaatggctactgtaaaattggaaggattgccgctggattgagtcttttcatggaaatgtcactcagcggggttaagcccactactattatgtacaacattatacttgatgggctgtttcgctccgggagaacagattctgcaaaggaaaaattccgtacgatgagcgaaagtggcataccagtgggcattggcacatacaacatagttcttagtggactttgtaaaaataattgcactggtgaagcaatagagctgttcaagaaactacgtgcaatgaatgtgaagattgatgtcaaaacactcactatcatgatttctgcaatgtttaaaagtaggagaattgaagaagccaaggagttgtttgctactatatcagccatcgggttggtgccttctgttgtgacttacagtgtaatgatgacgaatttcataaaagaagggtcgctggcagaggctgatgatatgtttttagcaatggagaaggctagctgtgctcccaactccatgctgctaaatcaagtggtcagggcgttgctgaaaaaaggtgcagttgtgaaggctgcaacttatctcgctaaacttgatgctaaacagctgtcagttgaagcctcaatgatttcgttaatagtatttctcttctcaggggaagggaaactaagggagcacgtagagttgcttccagtaaagtaccagcctcctgagagttcggctgacaat

SEQ ID NO: 2021 - DNA, 2145 bp, Triticum aestivum
atgagccgccgcgtcgtccccgtcggcagacgcatcttggagcagaacatcaaggctcggtaccacgccggagacattggcaccgaggacgcactccacctgtttgacgaattgctccaggatgctgggcgctcctcgatccatgccatcaactgcctcctcaccgttgtcggccgtgattgccctgcgctcggcgtctccctcttcaaccgcgtcgcaaggtccaaggtggcgcccagcagtatcacctatgccattctggtcgactgctgctgccgcgctggccgccaggaccttggacacactgccatgggacacgtcatcaagatggggtttcttgcagatgccattatcactttcagccacctgctaaaggccatctgtgcggagaacaagaccagctacgcaatggacatcgtactccggataatgcccgagtttaactgcatgccaaacattttctcctacaacattcttttcaagggtctctgcaatgagaagagaagccaagaggctcttgagctgattcaaattatggttgaggatggaggttgctgccgacctgatgtggtgacctatagcactgtaattgatggcttgttgaaagagggtgaggtaggcaaggcttacagcctattttgtgaaatgctgcgtcagggggtatcgccggatattgtgacctgtagttcgattatctctggcatgtgcaagcttcatgcaatggacaaggctgacgaggttcttcaacagatgcttgatagaagaattctgccagatgttgccacatataatagtctggtacatggatattattcattaggacagtgcgaagaggtggatcgggttctcaaggaaatgtctagaaatggtgttcaaccaaatattgtaacttacaatatacagatggattatctttgcaagagcggaaggtgcgcagaagctaggaaaatatttgattttatgatcggtttgggccaaaaaccagatgttactacctacagtgttctgcttcatgggtatgccatggaaaaatcttttcatgagatgcattgtctcattgatttgatggtgggaaatggtatctcaccagatcatcatgtctacaacatactcatatctgcatatgctaaagaagaaatggttggtgaggtattgcatatatttacaaaaatgcggcagcaaggattgaaccctaatgttgtgaactatggagcggtaataaacttgctttctagtattggccgaatggatgatgctatgtcccaattcagtcaaatgataactgaagggttagctcctgatgtcatagttttcaactcccttattagtggtttctgttcttgtggcaaatgggagaaggttcatgaactattttctgagatgtttgatcgcggcatctgtcccgacacagtgttcttcaacactgttatggatcacctttgcaaaaatggaagggttatggaagcccaagatgtgttcgacctgatggtacacatgggtgtgaagccttttgtccgtgattacaacacactgatacatggatactgtttagttggtaagatggatgaagggaggaagttacttgacaatatgttctcaattggctcgaaaccggatgatttcacctatagcatactgattgatggttactctaagaagggaaggatagatgatgcattgattgttatcaaggaaatgttggacgggaaggttaagccttctattatcacttttaatattatgattggtgcgttgcttaaaggtggcagaaaggaagaagccaaagatttgtttgatggtatctgggccaaaggattagtgcccgatgttgttacatatagcttaatgatacaaaaacttatagaagaaggttctctacaagagtctgatgatctattcctttctatggagaagaatggatgtgctgccgactcccggatgctaaatgctatagttagaagcttacttcagaaaggggaggtgccgagggctgggacttatctgtctaaaattgatgagaggaggttcacccctgaagcttccactgctagcttgttgactgcacttgtgtcaggggggaaaggccaggaatataaggagttactccctgaaaaatatcactcttttctggaacagggcactggc

SEQ ID NO: 2022 - DNA, 2145 bp, Triticum aestivum; identical to SEQ ID NO: 2021

SEQ ID NO: 2023 - DNA, 2145 bp, Triticum aestivum
atgaaccgccgcgtcgtccccgtcggcagacgcatcttggagcagaacatcaaggctcggtaccacgccggagacattggcaccgaggacgcactccacctgtttgacgaattgctccaggatgctgggcgctcctcgatccatgccatcaactgcctcctcaccgttgtcggccgtgattgccctgcgctcggcgtctccctcttcaaccgcgtcgcaaggtccaaggtggcgcccagcagtatcacctatgccattctggtcgactgctgctgccgcgctggccgccaggaccttggacacactgccatgggacacgtcatcaagatggggtttcttgcagatgccattatcactttcagccacctgctaaaggccatctgtgcggagaacaagaccagctacgcaatggacatcgtactccggataatgcccgagtttaactgcatgccaaacattttctcctacaacattcttttcaagggtctctgcaacgagaagagaagccaagaggctcttgagctgattcaaattatggttgaggatggaggttgctgccgacctgatgtggtgacctatagcactgtaattgatggcttgttgaaagagggtgaggtaggcaaggcttacagcctattttgtgaaatgctgcgtcagggggtatcgccggatgttgtgacctgtagttcgattatctctggcatgtgcaagcttcatgcaatggacaaggctgaggaggttcttcaacagatgcttgatagaagaattctgccagatgttgccacatataatagtctggtacatggatattattcattaggacagtgcgaagaggtggatcgggttctcaaggaaatgtctagaaatggtgttcaaccaaatattgtaacttacaatatacagatggattatctttgcaagagcggaaggtgcgcagaagctaggaaaatatttgattttatgatcggtttgggccaaaaaccagatgttactacctacagtgttctgcttcatgggtatgccatggaaaaatcttttcatgagatgcattgtctcattgatttgatggtgggaaatggtatctcaccagatcatcatgtctacaacatactcatatctgcatatgctaaagaagaaatggttggtgaggtattgcatatatttacaaaaatgcggcagcaaggattgaaccctaatgttgtgaactatggagcggtaataaacttgctttctagtattggccgaatggatgatgctatgtcccaattcagtcaaatgataactgaagggttagctcctgatgtcatagttttcaactcccttattagtggtttctgttcttgtggcaaatgggagaaggttcatgaactattttctgagatgtttgatcgcagcatctgtcccgacacagtgttcttcaacactgttatggatcacctttgcaaaaatggaagggttatggaagcccaagatgtgttcgacctgatggtacacatgggtgtgaagccttttgtccgtgattacaacatactgatacatggatactgtttagttggtaagatggatgaagggaggaagttacttgacaatatgttctcaattggctcgaaaccggatgatttcacctatagcatactgattgatggttactctaagaagggaaggatagatgatgcattgattgttatcaaggaaatgttggacgggaaggttaagccttctattatcacttttaatattatgattggtgcgttgcttaaaggtggcagaaaggaagaagccaaagatttgtttgatggtatctgggccaaaggattagtgcccgatgttgttacatatagcttaatgatacaaaaacttatagaagaaggttctctacaagagtctgatgatctattcctttctatggagaagaatggatgtgctgccgactcccggatgctaaatgctatagttagaatcttacttcagaaaggggaggtgccgagggctgggacttatctgtctaaaattgatgagaggaggttcacccctgaagcttccactgctagcttgttgactgcacttgtgtcaggggggaaaggccaggaatataaggagttactccctgaaaaatatcactcttttctggaacagggcactggc

SEQ ID NO: 2024 - DNA, 2145 bp, Triticum aestivum
atgagccgccgctttgtccccgtcagcagacgcatcttagagcagaacatcaaggctccgtaccacgccggagacattggcaccgaggacgcactccacctgtttgacgaattgctccaggttgctgggcgctcctcgatccatgccatcaactgcctcctcaccgttgtctgccatgattgccctgcgctcggcgtctccctcttcaaccgcgtcgcaaggtccaaggtggcgccctgcagtatcacctatgccattctggtcgactgctgctgccgcgctggccgcctggaccttggacacactgccatgggacacatcatcaagatgggatttactgcagatgctatgatcactttcagccacctactcaaggccatatgtgcagagaacaagaccagctatgcaatggacatcgtactccgaataatgcccatgtttaactgcgtacccaacaatttctcctacaacattcttttcaagggtctttgcaacgaaaggagaagccaagaggctcttgagctgattcacatgatggtacagcatggaggtagctgccaacctaatgtggtgtcctataacaccgtagttgatggcctgttgaaagagggtgaggtgggcaaagcttacaccctattttctgaaatgctgcgtcaggggatatcaccggatgttgtgacctgtcgttccatcatctctggcatgtgcaaggttcatgcaatggacaaggctgaggaggttcttcaacagatgcttgatagaagaattctgccagatgttgccacatataatagtctgatacatggatattatttattaggacagtgcgaagaggtggatcggattttcaaggaaatgtctagaaatggtgttcaaccaaatgttgtaacttacactatacagatggattatctttgcaagagcggaagatgcgcagaagctaggaagatttttgattctatgatcagtttgggccaaaaaccggatgtttatacctacagtattctactgcatgggtatgctatggaaaaatcttttcatgatatgcattgtctcattgatttgatggtagaaaatggtattgcaccagatcatcatgtctacaacatactcatatctgcatgtgctcaagaagaaatggttagtgacgtaatgcatatatttacaaaaatgcggcagcaaggattgaaccctaatgtagcgaactatggagtggttgtaaacttgctttgcagcatgggccgaatggatgatgctatgtaccaatacaatcaaatgataaccgaaggattagatcctgatatcatagttttcagcacccttataagtggtttttgttcttgtggcgcatgggagagggttcatgaaatattttctgaaatgttgaatcgtggcatctatcctgataccgtgttcttcaacataattatggaccacctttgcaaagagggaagggttatggaagcccaggatatcttcgacctgatggtacacatgggtgtgaagccttttgtccgtgattacaacacactgatacatggatactgtttagttggtaagatggatgaagggaggaagttacttgacaatatgtgctcaattggcttgaaaccggatgatttcacctatagcatactgattgatggttactctatgaagggaaggatagatgatgcattgattgttgtcagggaattgttggacgggaaggttggaccttctattatcacttttaatattatgattgttgcgttgcttaaaggtgggagaaaggaagaagccaaagatttgtttgatggtatctgggccaaaggattagtgcccgatgttgttacatatagcttaatgatacaaaaacttatagaagaaggttctctacaagagtctgatgatctattcctttctatggagaagaatggatgtgctgccgattcccgcatgctaaatgctatagttagaagcttacttcagaaaggggatgtgcccagggctgggacttatctgtctaaagttgatgagaggagcttcacccttgaaggttccacagctaccttgttgactgcacttgcttcagggaggaaaggccaggaatataaggggttactccctgaaaaataccactcttttctggaacaggacactggt

SEQ ID NO: 2025 - DNA, 2145 bp, Triticum aestivum; identical to SEQ ID NO: 2024

SEQ ID NO: 2026 - DNA, 1800 bp, Triticum aestivum
atggcaggtcccaaaagccacctactcaaggccatatgtgcagagaacaagaccagctatgcaatggacatcgtactccgaataatgcccatgtttaactgcgtacccaacaatttctcctacaacattcttttcaagggtctttgcaacgaaaggagaagccaagaggctcttgagctgattcacatgatggtacagcatggaggtagctgccaacctaatgtggtgtcctataacaccgtagttgatggcctgttgaaagagggtgaggtgggcaaagcttacaccctattttctgaaatgctgcgtcaggggatatcaccggatgttgtgacctgtcgttccatcatctctggcatgtgcaaggttcatgcaatggacaaggctgaggaggttcttcaacagatgcttgatagaagaattctgccagatgttgccacatataatagtctgatacatggatattatttattaggacagtgcgaagaggtggatcggattttcaaggaaatgtctagaaatggtgttcaaccaaatgttgtaacttacactatacggatggattatctttgcaagagcggaagatgcgcagaagctaggaagatttttgattctatgatcagtttgggccaaaaaccggatgtttatacctacagtattctactgcatgggtatgctatggaaaaatcttttcatgatatgcattgtctcattgatttgatggtagaaaatggtattgcaccagatcatcatgtctacaacatactcatatctgcatgtgctcaagaagaaatggttagtgacgtaatgcatatatttacaaaaatgcggcagcaaggattgaaccctaatgtagcgaactatggagtggttgtaaacttgctttgcagcatgggccgaatggatgatgctatgtaccaatacaatcaaatgataaccgaaggattagatcctgatatcatagttttcagcacccttataagtggtttttgttcttgtggcgcatgggagagggttcatgaaatattttctgaaatgttgaatcgtggcatctatcctgataccgtgttcttcaacataattatggaccacctttgcaaagagggaagggttatggaagcccaggatatcttcgacctgatggtacacatgggtgtgaagccttttgtccgtgattacaacacactgatacatggatactgtttagttggtaagatggacgaagggaggaagttacttgacaatatgtgctcaattggcttgaaaccggatgatttcacctatagcatactgattgatggttactctatgaagggaaggatagatgatgcattgattgttgtcagggaattgttggacgggaaggttggaccttctattatcacttttaatattatgattgttgcgttgcttaaaggtgggagaaaggaagaagccaaagatttgtttgatggtatctgggccaaaggattagtgcccgatgttgttacatatagcttaatgatacaaaaacttatagaagaaggttctctacaagagtctgatgatctattcctttctatggagaagaatggatgtgctgccgattcccgcatgctaaatgctatagttagaagcttacttcagaaaggggatgtgcccagggctgggacttatctgtctaaagttgatgagaggagcttcacccttgaaggttccacagctaccttgttgactgcacttgcttcagggaggaaaggccaggaatataaggggttactccctgaaaaataccactcttttctggaacaggacactggt

SEQ ID NO: 2027 - DNA, 2145 bp, Triticum aestivum; identical to SEQ ID NO: 2024

SEQ ID NO: 2028 - DNA, 2145 bp, Triticum aestivum; identical to SEQ ID NO: 2024

SEQ ID NO: 2029 - DNA, 2145 bp, Triticum aestivum; identical to SEQ ID NO: 2024

SEQ ID NO: 2030 - DNA, 2145 bp, Triticum aestivum; identical to SEQ ID NO: 2024

SEQ ID NO: 2031 - DNA, 2145 bp, Triticum aestivum
atgagccgccgctttgtccccgtcggcagacgcatcttagagcagaacatcaaggctcggtaccacgccggagacattggcaccgaggacgcactccacctgtttgacgaattgctccaggttgctgggcgctcctcgatccatgccatcaactgcctcctcaccgttgtcggccgtgattgccctgcgctcggcgtctccctcttcaaccgcgtcgcaagggccaaggtggcaccctgcagtatcacctatgccattctggtcgactgctgctgccgcactggccgccaggaccttggtttcgctgccatgggacacgtcatcaagatgggatttactgcagatgctatgatcactttcagccacctactaaaggccatctgtgcggagaacaagaccagctatgcaatggacatcgtactccgaataatgcccatgtttaactgcataccggatgtcttctcttacaacattcttttcaagggtctctgcaacgagaagagaagccaagaggctctcgagctgattcaggtgatggttgagcatggaggtcgctgccaacctgatgtggtgtcctatagcaccgtaattgatggcttgttgaaagagggtttggtgggcaaggtttacatcctattttgtgaaatgatacagagaggaatttcgccgaatgctgtgacctataactcaatcatctctggcatgtgcaaggttcatgcgatggacaaggctgagcaggttcttcaacagatgcctgatagaggaattctgccaaatgttgccacgtatactagtctaatacatggatatttttcattaggacagtgcaaagaggtggatcggattttcaaagaaatgtctagaaatggtgttcaaccaaatgttgtaacttataatatacagatggattatctttgcaagaatggaagatgcgcagaagctaggaagatttttgattccatggtcagtttgggccaaaaaccgactgttactacctacagcattttgcttcatgggtatgctctggaacgatcttttcatgagatacattgtctcattgatttgatggtgggaaatggtattgcgccaaatcattttctctacaacatactcatatctgcatatgctaaagaagaaatgattggtgaagtaatgcatatatttaaaaaaatgcggcagcatggattgaaccctaatgtagcgacctatggagcggtagtaaacttactttccaagattggccgaatggatgatgctatgtcccaattcaatcaaatgataactgaagggttagctcctgatatcatagttttcaccctccttattagtggtttctgttcttgtggcaaatgggagaaggttgatgaactattttctgagatgttggatcgcggcatctgtcccaacacagtgttcttcaacataattatggactgcctctgcaaaaatgaaagggttatggaagcccaagatctcttcgacctgatggtacacatgggtgtgaagcctgatgtgtgtacttataacacactgataggtggatacttgttcattggtaagatggatgaagtgaggaagttacttgacaatatggtctcaattggcttgaaaccaaatgttatcacatatagcatactgattgatggttactctaagaatggaagcatagatgatgcattggttgtttccagggaaatgttggccgggaaggttaagccttgtgttatcacttttaatattatgattggtgcattgcttaaatgtggcaggaaggcagaagccaaagatttgtttgacggtatctgggccaacggattagtgcccgatgttattacatatagcttaatgatacaaaaacttattgaagaaggttctctacaagagtctgatgatctattcctttctatggagaagaatggatgtgttgccgactcccatatgctaaatgctatagttagaagcttacttcagaaaggggaggtgccaagggctgggacttatctgtctaaaattgatgagaggaggttcacctttgaagcttccacagctagcttgttggttgcacttgcgtcagggcggaaaagccaggaatataaggagttactccccgaaaaataccactattttctggaagagggcactgat

SEQ ID NO: 2032 - DNA, 1245 bp, Triticum aestivum
atgagccgccgctttccccctggagctatgagcagacgcatcttggagcggaaaattcaagaccggtaccatgccggacacattggcactcacaacgcactcaacctgttcgacgaattgatccaggttgctgggccttcctcggtccgcgccattaactgcctcctcaccgtcgtcggccgtgattgccctgtgctgggcgtctccctcttcaaccgtgttgcaagagccaaggtgcctccccacaatatcacctatagcattctagtcgactgctgctgccgtgctggctgcttggaccttggacacgctgccatgggacacgttattaagctgggatttacagaagctatcgtcaatttcagccacctactcaaggccatctgtgcggagaagaagaccagctatgcaatggacattgtactccgaataatgcccatgtttaactgtgtaccaaatattttctcctacagcattgttttcaagggtctctgcaacgagaagagaagccaagaggctcttgagctgattcaaattatggttgaggatggaggttgctgccgacctgatgtggtgacctatagcactgtaattgatggcttgttgaaagagggtgaggtggaccaagcttacaacctattttctgaaatgctgcgtcagggggtatcgccgaatgttgtgacctgtagttcaatcatctctggcatgtgcaaagctcaatcagtggacaaggctaaggaggttcttcaacagatgtttgagagaggaattctgccaaatattaccacatataatagtctgatacaaggctattattcattaggacggtgcaaagaggtggatcagattttcaaggagatgactataaatggtgtccaaccagatattataacttacaatatacagatggattatctttgcaagagcggtcaatgtgcagaagctaggaagatttttgattctatgatcagtttgggccaaaacccgactgctactacctacagtattctgcttcatgggtatgctatggaaaaatcttttcatgatatgcattgtcttattgatttgatggtagaaaatggcatttcacctgatcattatgtctacaacatactcatatctgcatacgctaaagaagaaatggttggtgaggtaatgcatatatttacaaaaatgcggcagcaaggattgaaccctgatgcagtgagctacggaacagtaatagacttactttccaggattggc

SEQ ID NO: 2033 - DNA, 1245 bp, Triticum aestivum; identical to SEQ ID NO: 2032

SEQ ID NO: 2034 - DNA, 2151 bp, Triticum aestivum
atgagccgccgctttccccctggagctatgagcagacgcatcttggagcggaaaattcaagaccggtaccatgccggacacattggcactcacgacgcactcaacctgttcgacgaattgatccaggttgctgggccttcctcggtccgcgccattaactgcctcctcaccgtcgtcggccgtgattgccctgcgctgggcgtctccctcttcaaccgtgttgcaagagccaaggtgcctccccacaatatcacctatagcattctagtcgactgctgctgccgtgctggccgcttggaccttggacacgctgccatgggacacgttattaagctgggatttacagaagaagctatcgtcaatttcagccacctactcaaggccatctgtgcggagaagaagaccagctatgcaatggacattgtactccgaataatgcccatgtttaactgtgtaccaaatattttctcctacagcattgttttcaagggtctctgcaacgagaagagaagccaagaggctcttgagctgattcaaattatggttgaggatggaggttgctgccgacctgatgtggtgacctatagcactgtaattgatggcttgttgaaagagggtgaggtggaccaagcttacaacctattttctgaaatgctgcgtcagggggtatcgccgaatgttgtgacctgtagttcaatcatctctggcatgtgcaaagctcaatcagtggacaaggctaaggaggttcttcaacagatgtttgagagaggaattctgccaaatattaccacatataatagtctgatacaaggctattattcattaggacggtgcaaagaggtggatcagattttcaaggagatgactataaatggtgtccaaccagatattataacttacaatatacagatggattatctttgcaagagcggtcaatgtgcagaagctaggaagatttttgattctatgatcagtttgggccaaaacccgactgctactacctacagtattctgcttcatgggtatgctatggaaaaatcttttcatgatatgcattgtcttattgatttgatggtagaaaatggcatttcacctgatcattatgtctacaacatactcatatctgcatacgctaaagaagaaatggttggtgaggtaatgcatatatttacaaaaatgcggcagcaaggattgaaccctgatgcagtgagctacggaacagtaatagacttactttccaggattggccgaatggatgatgctatgtccctattcaatcaaatgataactgaaggattagctcctggtaccatagttttcaaccaccttattagtggtttttgtacttgtggcaaatgggagaaggttcatgaactattttctgaaatgttggatcgcggcatctgtccagacacagtgttcttcaacacagttatggatcgcctttgcaaaaatggaagggttacggaagcccaggatctcttcgacctgatggtacacatgggtgtgaagcctgatgtgtgtacttataacacactgatgggtggatacttgttcattggtaagatggatgaagtgagcaagttactagaaaatatgtgctcaattggcttgaaactggatgttgtcacctatagcatactgatagatggttactctaagaatggaaggatagatgatgcattggttgttttcagggaaatgatggacgggaaggttaagccttctgttatcacttttaatattatgattggtgcattgcttaaaggtggcaggaaggaagaagccacagatttgtttaatggtatctggcccaaaggattagtgcccgatgttgttacatatagcttaatgatacaaaaacttatagaagaaggttctctacaagagtctgatgatctattcctttctatggagaagaatggatgtgctgccgactcccgtatgctaaatgctatagttagaagcttacttcagaaaggggaggtgcccagggctgggtcttacctgtccaaaattgatgagaggagcttcacccttgaagcttccacagctagcttggtgacagcacttgcgtcaggggggaaaggccaagaatataaggagttactccccgaaaaataccactcttttctggaacacggcacggat

SEQ ID NO: 2035 - DNA, 1245 bp, Triticum aestivum; identical to SEQ ID NO: 2032

SEQ ID NO: 2036 - DNA, 1842 bp, Triticum aestivum
atgggacacgttattaagctgggatttacagaagaagctatcgtcaatttcagccacctactcaaggccatctgtgcggagaagaagaccagctatgcaatggacattgtactccgaataatgcccatgtttaactgtgtaccaaatattttctcctacagcattgttttcaagggtctctgcaacgagaagagaagccaagaggctcttgagctgattcaaattatggttgaggatggaggttgctgccgacctgatgtggtgacctatagcactgtaattgatggcttgttgaaagagggtgaggtggaccaagcttacaacctattttctgaaatgctgcgtcagggggtatcgccgaatgttgtgacctgtagttcaatcatctctggcatgtgcaaagctcaatcagtggacaaggctaaggaggttcttcaacagatgtttgagagaggaattctgccaaatattaccacatataatagtctgatacaaggctattattcattaggacggtgcaaagaggtggatcagattttcaaggagatgactataaatggtgtccaaccagatattataacttacaatatacagatggattatctttgcaagagcggtcaatgtgcagaagctaggaagatttttgattctatgatcagtttgggccaaaacccgactgctactacctacagtattctgcttcatgggtatgctatggaaaaatcttttcatgatatgcattgtcttattgatttgatggtagaaaatggcatttcacctgatcattatgtctacaacatactcatatctgcatacgctaaagaagaaatggttggtgaggtaatgcatatatttacaaaaatgcggcagcaaggattgaaccctgatgcagtgagctacggaacagtaatagacttactttccaggattggccgaatggatgatgctatgtccctattcaatcaaatgataactgaaggattagctcctggtaccatagttttcaaccaccttattagtggtttttgtacttgtggcaaatgggagaaggttcatgaactattttctgaaatgttggatcgcggcatctgtccagacacagtgttcttcaacacagttatggatcgcctttgcaaaaatggaagggttacggaagcccaggatctctttgacctgatggtacacatgggtgtgaagcctgacgtgtgtacttataacacactgatgggtggatacttgttcgttggtaagatggatgaagtgagcaagttacttgacaatatggtctcaattggcatggaaccagatgttatcacatatagcatactgattgatggttactctaagaatggaaggatagatgatgcattggttgttttcagggaaatgttggacacgaagggtaagccgtctgttatcagttttaatattatgattggtgcattgcttaaatgtggtaggaaggaagaagccaaagatttgtttgatggtatctgggccaatgggttagtgcctgacgttattacatatagcttaatgatacaaaaacttattgaagaaggttctctacaagagtctgatgatctattcctttctacggagaagaatggatgtgctgccgactcccgtaggctaaatgctatagttagaagcttacttcagaaaggggagattcctagggctgggacttatctgtctaaaattgatgagaggggcttcacccttgaagcttccacagctagcttgttgactgcacttgcttcagggggaaaaggccaggaatacaaggagttactccctgaaaaataccactcttttctggaacagggcactttgaacttc

SEQ ID NO: 2037 - DNA, 2145 bp, Triticum aestivum
atgagccgccgctttgtccccgtcgacagacgcatcttggagaggaacatcaaggatcggtaccatgccggatgcattggcaccgaggacgcactccacctgttcgacgaattgctccaggttgctgggccttcctcgatccctgccatcaactgcctcctcactgttgttggccgtgattgccccgcgctcggcgtctccctcttcaaccatgttgcaagagccaaggtgcctccccacaatatcacctatggcattctagtcgactgctgctgccgtgctggccgcctggaccttggacacgctgccatgggacacgtcattaagttgggatttacagcagaagctatcatcaatttcagccacctactcaaggccatctgcgccgagaagaagaccagttatgcaatggacatcgtactccggataatgcctgagtttaactgcataccaaacattttctcctataacattcttttcaagggtctctgcaacgagaagagaagccaagaggctctcgagctgattcaaattatggttgaggatggaggttgctgccgacctgatgtggtgacctatagcactgtaattgatggcttgttgaaagaggatgaggtggaccaagcttacagcctattttctgaaatgctgcgtcagggggtatcaccgaatgttgtgacctgtaattcaatcatctctggcatgtgcaagcttcacgcgatggacaaggctgaggaggttcttcaacagatgcttgatagacgaattctgccagatgttaccacatatactagtttaatacatggatattattcattaggacagtgcgaggaggtggatcgggttttcatagaaatgtctagaaatggtgttcaaccaaatatcataacttatagtatacagatggattatctttgcaagaatggaagatgcacagaagctaggaagaattttgatttcatgatcagtttgggccagaaaccgactgttactacctacaacattatgcttcatgggtatgctatggaaagatcttttcatgatatgaattgtctcattgatttgatggatgataatggtatttcaccagatcattatggatacaacatacttatatttgcatatgctgaagaaaaaatggttgatgaagtaatgcatatatttacaaaaatgcggcagcaaggattgaaccctgatgcagtgagctatggaacagtaatagacttactttccaggattgaccgaatggatgatgctatgtcccagttcaatcaaatgataactgaagggttagttcctgatatcgtagtttttaaccctcttattaggggtttctgttcttgtggcaaatgggagaaggttgatgaactattttctgagatgttggatcgcggcatctgtcccaacatagtgttcttcaccacaattatggaccgcctttgcaaaaatggaagggttatggaagcccaagatctcttcgacctgatggtacacatgggtgtgaagcctgatgtgtgtacttataacatactgataggtggatacttgttcattggtaagatggatgaagtgagcaagttacttgacaatatggtctcaattggcatggaaccagatgttatcacctataacatactgattgatggttactctaagaatggaaggatagatgatgcatttgttgttttcagagaaatgttggccgggaaggttaagccttgcattatcacttttaatattatgcttggtgcgttgcttaaaggtggcaggaaggaagaggctaaagatttgtttgatggtatctgggctaaagggttagtgcccaccgttgttacatatagcttaatgatacaaaaacttatagaagaaggttctctacaagagtctgatgatctatttgtttctatggagaagaatggatgtgctgccgactcccatataataaatgctatagttagaagcttatttcggaaaggggaggtgcccagggctgggacttatctgtctaaaattgatgagaggagcttcacccttgaagcttccacagctatcttgttgactgcacttgcttcaggggggaaaggccaggaatataaagagttactccctgagaagtaccactcttttctggaacagggcactgat

SEQ ID NO: 2038 - DNA, 2145 bp, Triticum aestivum; identical to SEQ ID NO: 2037

SEQ ID NO: 2039 - DNA, 2145 bp, Triticum aestivum; identical to SEQ ID NO: 2037

SEQ ID NO: 2040 - DNA, 2145 bp, Triticum aestivum; identical to SEQ ID NO: 2037

SEQ ID NO: 2041 - DNA, 2145 bp, Triticum aestivum; identical to SEQ ID NO: 2037

SEQ ID NO: 2042 - DNA, 2145 bp, Triticum aestivum
atgagccgccgctttgtccccgtcgacagacgcatcttggagaggaacatcaaggatcggtaccatgccggatgcattggcaccgaggacgcactccacctgttcgacgaattgctccaggttgctgggccttcctcgatccctgtcatcaactgcctcctcactgttgttggccatgattgccccgcgctcggcgtctccctcttcaaccatgttgcaagagccaaggtgcctccccacaatatcacctatggcattctagtcgactgctgctgccgtgctggccgcctggaccttggacacgctgccatgggacacgtcattaagttgggatttacagcagaagctatcatcaatttcagccacctactcaaggccatctgcgccgagaagaagaccagttatgcaatggacatcgtactccggataatgcctgagtttaactgcataccaaacattttctcctataacattcttttcaagggtctctgcaacgagaagagaagccaagaggctctcgagctgattcaaattatggttgaggatggaggttgctgccgacctgatgtggtgacctatagcactgtaattgatggcttgttgaaagaggatgaggtggaccaagcttacagcctattttctgaaatgctgcgtcagggggtatcaccgaatgttgtgacctgtaattcaatcatctctggcatgtgcaagcttcacgcgatggacaaggctgaggaggttcttcaacagatgcttgatagacgaattctgccagatgttaccacatatactagtttaatacatggatattattcattaggacagtgcgaggaggtggatcgggttttcatagaaatgtctagaaatggtgttcaaccaaatatcataacttatagtatacagatggattatctttgcaagaatggaagatgcacagaagctaggaagatttttgatttcatgatcagtttgggccagaaaccgactgttactacctacaacattatgcttcatgggtatgctatggaaagatcttttcatgatatgaattgtctcattgatttgatggatgataatggtatttcaccagatcattatggatacaacatacttatatttgcatatgctgaagaaaaaatggttgatgaagtaatgcatatatttacaaaaatgcggcagcaaggattgaaccctgatgcagtgagctatggaacagtaatagacttactttccaggattgaccgaatggatgatgctatgtcccagttcaatcaaatgataactgaagggttagttcctgatatcgtagtttttaaccctcttattaggggtttctgttcttgtggcaaatgggagaaggttgatgaactattttctgagatgttggatcgcggcatctgtcccaacatagtgttcttcaccacaattatggaccgcctttgcaaaaatggaagggttatggaagcccaagatctcttcgacctgatggtacacatgggtgtgaagcctgatgtgtgtacttataacatactgataggtggatacttgttcattggtaagatggatgaagtgagcaagttacttgacaatatggtctcaattggcatggaaccagatgttatcacctataacatactgattgatggttactctaagaatggaaggatagatgatgcatttgttgttttcagagaaatgttggccgggaaggttaagccttgcattatcacttttaatattatgcttggtgcgttgcttaaaggtggcaggaaggaagaggctaaagatttgtttgatggtatctgggctaaagggttagtgcccaccgttgttacatatagcttaatgatacaaaaacttatagaagaaggttctctacaagagtctgatgatctatttgtttctatggagaagaatggatgtgctgccgactcccatataataaatgctatagttagaagcttatttcggaaaggggaggtgcccagggctgggacttatctgtctaaaattgatgagaggagcttcacccttgaagcttccacagctatcttgttgactgcacttgcttcaggggggaaaggccaggaatataaagagttactccctgagaagtaccactcttttctggaacagggcactgat

SEQ ID NO: 2043 - DNA, 2145 bp, Triticum aestivum; identical to SEQ ID NO: 2037

SEQ ID NO: 2044 - DNA, 2139 bp, Triticum aestivum
atgagccgccgctttcccactgtcggcagacgcatcttggagcggaaaattcaagaccggtaccgtgccggacacattggcactgacgacgcactcaacctgttcgacgaattgatccagcttgctgggccttcctcggtccgcgccattaactgcctcctcaccgtggtcggccgtgattgccctgcgctcggcatcttcctcttcaatcgtgttgcaagagccaaggtgcctccccacaatatcacctatggcattctagtcgactgctgctgccgtgctggccgcttggaccttggacacgctgccatgggacacgtcattaagttgggatttgcagcagaagccatcgtcaatttcagccacctactcaaagccatctgcgccgagaagaagaccagctatgcaatggaaatcgtactccgaataatgcccatgtttaactgcgtaccaaacattttctcctacagtattcttttcaagggtctctgcaacgagaaaagaagccaagaggctctcgagctgattcacatcatggttgaccatggaggtagctgccaacctaatgtggtgtcctataacactgtagttgatggcctgttgaaagagggtgaggcaggcaaggcttacagcctattttctgaaatgctacagagggaaattttgccggatgttgtgacctacaactcaatcatctctggcatgtgcaaggttcatgcgatggacaaggctgaggaggttcttagacagatgtttgatagaggaattctcccagatattgccacatatactagtctaatacatggatattattcatcaggacagtgcaaagaggtggaacgggttttcaacgaaatgtctagaaatggtgttcaaccaaatatggtaacttacaatatacagatggattatctttgcaagagcggaagatgcacagaagctaggaagatttttgattctctgatcgatttgggccaaaaactgactgttactacctacagcattctgcttcatgggtatgctctggaacgatctttgcatggtatgcattgtctcattgatttgatggtgggaaatggtatctcaccagatcatcatgtctacaacatactcatatctgtatatgctaaagaaggaatggttggtgaggtaatgcatatatttacaaaaatgcggcagcaaggattgaaccctgatgttgtgaactacggaacggtaataaacttactttgcagcattggccgaatggatgatgctatgttgcaattcagtcaaatgataacggaaggattagctcctaatatcatagttttcaccccccttattagtggtttttgtacgtatggcaaatgggagaaggttcatgaactattttctgaaatgttcgatcgcggcatctatcctgataccttgtttttcaccacagttatggaccgcctttgcaaaaatgaaagggttatggaagcccaagatatctttgacctgatgggacacatgggtgttaagcctgacgtgtgtacttataacacactgataggtggatacttgtttgttggtaagatggatgaagtgaggaaattacttgacaatatggtctcaattggcatggaaccagatgttatcacctatagcagactgatagatggttactctaagaatggaaggatagatgatgcattggttgttttctgggaaatgttggatgggaaggttaagccgtctgttatcacttttaatattattattggtgcgttgcttcaaggtggcaggaaggaagaagccaaagatttgtttgattgtatctgggccaaaggattagtgcctgatgttgttacatatagcttaatgatacaaaaacttatagaagaaggttctctacaagagtctgatgatctattcatttctatggagaagaatggatgtgctgccgactcccgtatgctgaatgctatagttagaagcttacttcagaaagaggagattcttagggctgggacttatctgtctaaaattgatgagaggaggttcacccttgaagcttccactgcgagcttgttgactgcacttgtgtcaggggggaaaggccaggaatataaggagttactcccggaaaattactctgaactgctaatcgaggcc

SEQ ID NO: 2045 - DNA, 2073 bp, Triticum aestivum
atgagccgccgcgccgtccccgctggcagacgcatcttggagcagaacatcaaggcccggtaccgcgctggcaacattggcaccgaggatgcactccacctgtttgacgaattgctcccggttgctcggccctcctcagttcctgccatcaactgcctcctcattgtcgtcggtcgtgattgccctgcactcgccgtctccctcttcaaccgcattgcaagaaccaaggtggcaccccagaatatcacctacggcattctagtcgactgctgctgccttgcgggccgcttggaccttggtttcgctgccatgggccacatcattaagacgggatttgcggcaggatccgttatctctttcagccacctgctcagggccgtctgtgcggagaagaagaccagctacggaatggacatcgtgctccgaattatgcctgagcttaactgcacgccggatgtttactcctacagcattcttttcaagggtctctgcaacgagaagagaagccaagaggctctcgagctgattcacgtgatggttgagcacggaggtagctgccaacctaatctggtctcctacagcaccgtaattgatggcttgttgaaagagggcgaggtgggcaaagcttacagcctattttgtgaaatggtacacagggggatttcgccagatattgtgacctacaactcaatcatctctggcatgtgcaaggtccatgcgatggacaaggctgagaaggttcttcaacaaatgtttgatagagaaattctgccagatactaccacatatactagcctaatacatggatattattcatcaggacaatgcaaagaggtggaacgggttttcgagcacatgtctataaacggtgttcaaccaaatatgataacttacaatatacagatggattatctttgcaagagcggaagatgcgcagaagctaggaagatttttgattctatggtcagtttgggccaaaaaccgtctgttactacctatagtattctgcttcatggttatgctatggaaaaatcatttcatgatatgcattgtctcattgatttgatggtagaaaatggtatctcaccagatcattatgtctacaacatgctcatatctgcatgtcctaaagaagaaatgtttggtgaggtaatgcatatatttacaaaaatgcggcagcaaggattgaaccctaatgttgctaactatggagcggtaataaacttgctttccagtgctggcaaaatggatgatgctatgtgccaattcaatcaaatgataaccgaaggattagctcctgatatcgtaattttcaacacccttattagtggtttttgtacttgtggcaaatgggagaaggttcatgagctattttctgaaatgttgaatcgcggcatctatcctgatatcgtgtccttcaccatacttatggaccgcctttgcaaaagtggaagggttatcgaagcccaagatatgtttgacctgatggtacgcatcggtgttaagcctaacattcatacttatggcacattgatgcatgggtactttttcgttagaaaggtggatgaagtgaggaagttacttggcaatatgctctcaactggcttgaaaccagatgttttcacctataccatattgattgatggttactttaagaatggaatgatagatgacgcatcagctgttttcactgagatgttggaaaagaaagttgagccttctgtcatcacttacagaacaatgcggtatggcctgttaaattctggaaggactgttgctgccactaaactatatctcaggatgattgacagtggaatacacgtggatattgcggcctacaacataattctcagaggcctttgtaaaaataactgtgtcgatggagcgctaagaatgtttcaacacctatcttcaacaaattatccgcttgaggttgggacttacaatattatgattagtgcgttggttaaaggtggcagaaaggaagaagccacagatttgtttgatgatatgttggccaaaggattagtgccggatgctgttatgtatagcttaataaaaaaaggagtagtc

SEQ ID NO: 2046 - DNA, 2073 bp, Triticum aestivum; identical to SEQ ID NO: 2045

SEQ ID NO: 2047 - DNA, 2073 bp, Triticum aestivum; identical to SEQ ID NO: 2045

SEQ ID NO: 2048 - DNA, 2073 bp, Triticum aestivum; identical to SEQ ID NO: 2045

SEQ ID NO: 2049 - DNA, 2073 bp, Triticum aestivum; identical to SEQ ID NO: 2045

SEQ ID NO: 2050 - DNA, 2073 bp, Triticum aestivum; identical to SEQ ID NO: 2045

SEQ ID NO: 2051 - DNA, 1989 bp, Triticum aestivum
atggactgctgctgccgcgcaaaccgccaggatctggcgctcgccttcttcggccgtctcctcaggacgggacttaaggcaggcgtcatagaagtcaacactcttctcaagggactctgccgcgcaaagcgggctgatgaggctctggacattctgcttcacaggatgcctgagcttggctgcgcccccaacgtggtggcatataccacggtcatccacggcttctttaaggaaggccaagtaagcaaggcatgcaatctattccatgaaatggcgctgcagggcgttacacctgatgtggtgacatataactcggttattgatgcgctgtgcaaggccagagccatggacaatgcagagtatttccttcgtcaaatggttgataatggtgtcgtacctaataatgtgacatatagtagcctcatccatggatattcctcttcaggccattggaaggaggcagttagggtattcaaagagatgacaggtcggagggttacaccagatgtgcatacttacaacatgtttatgacctttctttgcaaacatggaagaagcaaagaagctgcaggaatttttgataccatggctatgaagggcctgaaacctgacaacgtttcatatgctattcgccttcatgggtatgccaccgaaggatgcttagttgatatgattaatctcttcaattcaatggaaagagactgtattctacctgactgtcatatcttcaacatactgattaatgcatatgctaaatctgggaagcttgataaggctatgcttatcttcaatgaaatgcagaaacaaggagtgagtccaaatgcagtcacatattcaaccataatacatgcattttgcaaaaagggtaggttggatgatgctgtgataaagtttaatcagatgattgatacaggagtacgacagggcacagctgtttatcgttccctaatccaaggtttttgtacacacggcgatttggtgaaagcaaaggaattgcttactgaaatgatgaacaaaggtatacctcctcctgatattaagttcttccattcaatcatgcagaacctatgcacagaaggaagggtaatagaagcacgggatatccttggcttgatagcacacataggtatgaggcctaatgtttgcacatttaatatactgatcggtggatactgcctagtcggcaagatggaggatgcctcaaaaatatttgatgatatgatgtcatatggcttagaaccttctaatattacgtatggtatacttattaatggctattgcaaaaatagaaggattgatgacgggcttattctgttcaaagagatgctgcgcaagggacttaaacctacaacttttaattataacgtcatactggatggattatttctggctggacaaactgttgctgcaaaagagaagtttgatgagatggttgaatctggagtaagtgtgtgcattgatacatactctatagttcttggtggactttgtagaaatagctgcagtagcgaagcgatcaccctgttccgaaaattaagcgcaatgaatgtgaaatttaatattacaattgtcaataccattattggtgccttctacagggtcgagagaaaccaagaggctaaggatttgcttgctgctattccagccagtggcttggttcctaatgttgttacgtacaccataatgattaaaaatcttataaaagaaggttcagtggaagaagctgacaatctttttttatcgatagagaagagcggctgtagtgccaactcttatctgttaaatcatatcatcagaaggttactggaaaaaggagagacagtcaaggctggaaattatatgtctaaagttgatgcaaagagctactcacttgaagctaaaactgtttcgctgctgatctctctgttttcaaggaaagggaaatatagagaacacatcaaattgctccctacaaagtatcagtttctggaagaagcagccacagttgaa

SEQ ID NO: 2052 - DNA, 801 bp, Triticum aestivum
atggaggatgcctcaaaaatatttgatgatatgatgtcatatggcttagaaccttctaatattacgtatggtatacttattaatggctattgcaaaaacgaaaggattaacgatgggttgattctgttcaaagagatgctgcgcaagggacttaaacctacaacttttaattataacatcatactggatggattatttctggctggacaaactgttgctgcaaaagagaagtttgatgagatggttgaatctggagtaagtgtgtgcattgatacatactctatagttcttggtggactttgtagaaatagctgcagtagcgaagcgatcaccctgttccgaaaattaagcgcaatgaatgtgaaatttaatattacaattgtcaataccattattggtgccttctacagggtcgagagaaaccaagaggctaaggatttgtttgctgctattccagccagtggcttggttcctaatgttgttacctacaccataatgattaaaaatcttataaaagaaggttcagtggaagaagctgacaatctttttttatcgatggagaagagcggctgtagtgccaacttttatctgttaaatcatatcatcagaaggttactggaaaaaggagagatagtcaaggctggaaattatatgtctaaagttgatgcaaagagctactcccttgaagctaaaactgtttcactgctgatctctctgttttcaaggaaagggaaatatagagaacacatcaaattgctccctacaaagtatcagtttctggaagaagcagccacagttgaa

SEQ ID NO: 2053 - DNA, 1989 bp, Triticum aestivum
atggactgctgctgccgcgcaaaccgccaggatctggcgctcgccttcttcggccgtctcctcaggacgggacttaaggcaggcgtcatagaagtcaacactcttctcaagggactctgccgcgcaaagcgggctgatgaggctctggacattctgcttcacaggatgcctgagcttggctgcgcccccaacgtggtggcatataccacggtcatccacggcttctttaaggaaggccaagtaagcaaggcatgcaatctattccatgaaatggcgctgcagggcgttacacctgatgtggtgacatataactcggttattgatgcgctgtgcaaggccagagccatggacaaggcagagtatttccttcgtcaaatggttgataatggtgtcgtacctaataatgtgacatatagtagcctcatccatggatattcctcttcaggccattggaaggaggcagttagggtattcaaagagatgacaggtcggagggttacaccagatgtgcatacttacaacatgtttatgacctttctttgcaaacatggaagaagcaaagaagctgcaggaatttttgataccatggctatgaagggcctgaaacctgacaacgtttcatatgctattcgccttcatgggtatgccaccgaaggatgcttagttgatatgattaatctcttcaattcaatggaaagagactgtattctacctgactgtcatatcttcgacatactgattaatgcatatgctaaatctgggaagcttgataaggctatgcttatcttcaatgaaatgcagaaacaaggagtgagtccaaatgcagtcacatattcaaccataatacatgcattttgcaaaaagggtaggttggatgatgctgtgataaagtttaatcagatgattgatacaggagtacgacagggcacagctgtttatcgttccctaatccaaggtttttgtacacacggcgatttggtgaaagcaaaggaattgcttactgaaatgatgaacaaaggtatacctcctcctgatattaagttcttccattcaatcatgcagaacctatgcacagaaggaagggtaatagaagcacgggatatccttggcttgatagcacacataggtatgaggcctaatgtttgcacatttaatatactgatcggtggatactgcctagtcggcaagatggaggatgcctcaaaaatatttgatgatatgatgtcatatggcttagaaccttctaatattacgtatggtatacttattaatggctattgcaaaaatagaaggattgatgacgggcttattctgttcaaagagatgctgcgcaagggacttaaacctacaacttttaattataacgtcatactggatggattatttctggctggacaaactgttgctgcaaaagagaagtttgatgagatggttgaatctggagtaagtgtgtgcattgatacatactctatagttcttggtggactttgtagaaatagctgcagtagcgaagcgatcaccctgttccgaaaattaagcgcaatgaatgtgaaatttaatattacaattgtcaataccattattggtgccttctacagggtcgagagaaaccaagaggctaaggatttgtttgctgctattccagccagtggcttggttcctaatgttgttacgtacaccataatgattaaaaatcttataaaagaaggttcagtggaagaagctgacaatctttttttatcgatagagaagagcggctgtagtgccaactcttatctgttaaatcatatcatcagaaggttactggaaaaaggagagacagtcaaggctggaaattatatgtctaaagttgatgcaaagagctactcacttgaagctaaaactgtttcgctgctgatctctctgttttcaaggaaagggaaatatagagaacacatcaaattgctccctacaaagtatcagtttctggaagaagcagccacagttgaa

SEQ ID NO: 2054 - DNA, 777 bp, Triticum aestivum
atgaactgctgctgccgcgtctgtcgtccagaccttgggtttgccttatttggccgcctcctaaggagaggcctcaaaacagatgatatcgtcaccaacaccctcctcaagtgcctctgctgcgcaaaacggacagacgaggctgtcagcgtgctgcttcataggatgtccaagcttggttgtgtgcctgatgtcatctcatacaacacagttcttaagagcttatgtgataatagcagcagccagcgggcgctcgacctccttcagatgatgacgaaaggaggtggctgctcccctgacgtagtgacatacaacacggtcatccatggcttcctgcaggaaggggaagtaagcaaggcatgcgatcgataccatgaaatggtgcagcaaggggttctgcatgatgtggtgacatataattcgattcttgatgcgctgtgcaaggcaggagctatggacaaggctgagttgttccttcagcagatggctgatgatgatattcgaccgaatgaagtgacatataatgcaatgatccatggatattccactttgggccagtggaaaagggcgactcaaatgtttagagaaatgacaagccgtggtcttgctccaaatattgttacttggagctcgttgatgacctccctctgcaagcatggaagaagcaaagaagctgcagaaattttcattccatggctgcaaaaggccacaagcctaacatcgttacgtatcgtgttctgcttcacgggtatgccgctgagggattctttgcagata

SEQ ID NO: 2055 - DNA, 1821 bp, Triticum aestivum
atgatgacgaaaggaggtggctgctcccctgacgtagtgacatacaacacggtcatccatggcttcctgcaggaaggggaagtaagcaaggcatgcgatctataccatgaaatggtgcagcaaggggttttgcatgatgtggtgacatataattcgattcttgatgcgctgtgcaaggcaggagctatggacaaggctgagttgttccttcggcagatggttgatgatgatattcgaccgaatgaagtgacatataatgcaatgatccatggatattccactttgggccagtggaaaaaggcgactcaaatgtttagagaaatgacaagccgtggtcttgctccaaatattgttacttggagctcgttgatgacctccctctgcaagcatggaagaagcaaagaagctgcagaaatttttcattccatggctgcaaaaggccacaagcctaatatcgttacgtatcgtgttctgcttcacgggtatgccgctgaaggattctttgcagatatgattgatctctttaattcaatggcaaacaatggtattgtacccgattgccacgttttcaacatattaattaatgcatatgctaaatgtggaatgatggatgaagctatgtcaatgcttactgaaatgcggggacaaggagtgagtccggatgtgttcacctatgcaactgtaatagctgcactttgcagaatgggtaggttgactgatgctatggacaattttaatcggatgattgggaagggagtacaaccgagcaaagttgtttatcactccctaattcagggtttctgtacgcatggtaatctggtgaaagtgaaggagttgatttttggaatgacggacaaaggtattcctcaccctaacattgtcttcttcagttcaataatgcatagtctgtgcaacgaaggaagggttatggatgcacaccatatctttgacttggttatagacattggtgagagacctgatctcattacgtttaatacgctgattgacggatattgcttagtcagcaagatggaggaagcactccgactacttgattccatggtatcagctggcattaagccaaatgtgattacatataatacacttattaatggctattgtaggagtggaaggctcgatgatggcgttattctattcagagaaatgttgcataccagagttaaacctaacactgttacatataacatcatactggatgggttatttcgtgctggaagaactgttgctgcgaagaagatgttccatgagatgatcgaaactggaacagcagtgagcatttccacatacagcatagttcttggaggactttgtaggaataactgcaccgatgaagcaatcacttttttccagaaattagttgcaatgaatgtgaagtccgatattgcgatactcaataccatgattaaggcaatgtacaaggttcagagaagagaagaagctaacgatttgtttgcttcattaccagcctatggactggtgcctaatgctgctacttacagagtaatgataagcaatcttttgaaagaaggatcattggaagaagctgacaatatgttctcgtcaatggagaaaagtggttgtgctccaagctctcgtcttgtaaatgatatcatcagaaaattattggaaaagggggagatagtcaaggccggaaattatatgtcgaaagttgacgggaagatcatctcctttgaagcttcaaccacttcgttgttgttgtctctcttttcggagaaaggcaaatatcgggaacaattacaattgctccctgcgaaataccaactttttgagggagtcatt

SEQ ID NO: 2056 - DNA, 1395 bp, Triticum aestivum
atggctgcaaaaggccacaagcctaacatcgttacgtatcgtgttctgcttcacgggtatgccgctgagggattctttgcagatatgattgatctctttaattcaatcgcaaacaatggtattgtacccgattgccacgttttcaacatattaattaatgcatatgctaaatgtggaatgatggatgaagctatgtcaatgcttactgaaatgcggggacaaggagtgagtccggatgtgttcacctatgcaactgtaatagctgcactttgcagaatgggtaggttgactgatgttatggacaattttaatcggatgattgggaagggagtacaaccgagcaaagttgtttatcactccctaattcagggtttctgtacgcttggtgatctggtgaaagtgaagaagttgatttttgaaataacggacaaaggtattcctcaccctaacattgtcttcttcagttcaataatgcatagtctgtgcaacgaaggaagggttatggacgcacaccatatctttgacttggttatagacattggtgagagacctgatctcattacatttaatatgctgattgacggatattgcttagtcagcaagatggaggaagcactccgactacttgattccatggtatcagctggcattaagccaaatgtgattacatataatacacttattaatggctattgtaggagtggaaggcttgatgatggcgttattctattcagagaaatgttgcataccagagttaaacctaacactgttacatataacatcatactggatgggttatttcgtgctggaagaactgttgctgcgaaaaagatgttccatgagatgatcgaaactggaacagcagtgagcatttccacatacagcatagttcttggaggactttgtaggaataactgcaccgatgaagcaatcgcttttttccagaaattagttgcaatgaatgtgaagttcgatattgtgatactcaataccatgattaaggcaatctacaaggttcagagaagagaagaagctaacgatttgtttgctttattaccagcctgtgggctggtacctaatgcctctacttacggagtagtaatacagaatcttctgaaagaaggatcgttggaagaagctgacaatatgttttcatcaatggagaagagtggttgtgctccaagctctcgtcttgtaaatgatatcatcagaaaattattggaaaagggggagatagtcaaggccggaaattatatgtcgaaagttgacgggaagatcatctcctttgaagtttcaaccacttcgttgttgttgtctctcttttcggagaaaggcaaatatcgggaacaattacaattgctccccgcgaaataccaattttttgagggagtcatt

SEQ ID NO: 2057 - DNA, 1821 bp, Triticum aestivum; identical to SEQ ID NO: 2055

SEQ ID NO: 2058 - DNA, 1821 bp, Triticum aestivum
atgatgacgaaaggaggtggctgctcccctgacgtagtgacatacaacacggtcatccatggcttcctgcaggaaggggaagtaagcaaggcatgcgatctataccatgaaatggtgcagcaaggggttttgcatgatgtggtgacatataattcgattcttgatgcgctgtgcaaggcaggagctatggacaaggctgagttgttccttcggcagatggttgatgatgatattcgaccgaatgaagtgacatataatgcaatgatccatggatattccactttgggccagtggaaaaaggcgactcaaatgtttagagaaatgacaagccgtggtcttgctccaaatattgttacttggagctcgttgatgacctccctctgcaagcatggaagaagcaaagaagctgcagaaatttttcattccatggctgcaaaaggccacaagcctaatatcgttacgtatcgtgttctgcttcacgggtatgccgctgaaggattctttgcagatatgattgatctctttaattcaatggcaaacaatggtattgtacccgattgccacgttttcaacatattaattaatgcatatgctaaatgtggaatgatggatgaagctatgtcaatgcttactgaaatgcggggacaaggagtgagtccggatgtgttcacctatgcaactgtaatagctgcactttgcagaatgggtaggttgactgatgctatggacaattttaatcggatgattgggaagggagtacaaccgagcaaagttgtttatcactccctaattcagggtttctgtacgcatggtaatctggtgaaagtgaaggagttgatttttgaaatgacggacaaaggtattcctcaccctaacattgtcttcttcagttcaataatgcatagtctgtgcaacgaaggaagggttatggatgcacaccatatctttgacttggttatagacattggtgagagacctgatctcattacgtttaatacgctgattgacggatattgcttagtcagcaagatggaggaagcactccgactacttgattccatggtatcagctggcattaagccaaatgtgattacatataatacacttattaatggctattgtagaagtggaaggctcgatgatggcgttattctattcagagaaatgttgcataccagagttaaacctaacactgttacatataacatcatactggatgggttatttcgtgctggaagaactgttgctgcgaagaagatgttccatgagatgatcgaaactggaacagcagtgagcatttccacatacagcatagttcttggaggactttgtaggaataactgcaccgatgaagcaatcacttttttccagaaattagttgcaatgaatgtgaagtccgatattgcgatactcaataccatgattaaggcaatgtacaaggttcagagaagagaagaagctaacgatttgtttgcttcattaccagcctatggactggtgcctaatgctgctacttacggagtaatgataagcaatcttttgaaagaaggatcattggaagaagctgacaatatgttctcgtcaatggagaaaagtggttgtgctccaagctctcgtcttgtaaatgatatcatcagaaaattattggaaaagggggagatagtcaaggccggaaattatatgtcgaaagttgacgggaagatcatctcctttgaagcttcaaccacttcgttgttgttgtctctcttttcggagaaaggcaaatatcgggaacaattacaattgctccctgcgaaataccaattttttgagggagtcatt

SEQ ID NO: 2059 - DNA, 2088 bp, Triticum aestivum
atgaactgctgctgccgcgtctgtcgtccagaccttgggtttgccttatttggccgcctcctaaggacaggcctcaaaacagatgatatcgtcaccaacaccctcctcaagtgcctctgctgcgcaaaacggacagacgaggctgtcagcgtgctgcttcataggatgtccaagcttggttgtgtgcctgatgccatctcatacaacacagttcttaagagcttatgtgataatagcagcagccagcgggcgctcgacctccttcagatgatgacgaaaggaggtggctgctcccctgacgtagtgacatacaacacggtcatccatggcttcctgcaggaaggggaagtaagcaaggcatgcgatcgataccatgaaatggtgcagcaaggggttctgcatgatgtggtgacatataattcgattcttgatgcgctgtgcaaggcaggagctatggacaaggctgagttgttccttcggcagatggttgatgatgatattcgaccgaatgaagtgacatataatgcaatgatccatggatattccactttgggccagtggaaaagggcgactcaaatgtttagagaaatgacaagccgtggtcttgctccaaatattgttacttggagctcgttgatgacctccctctgcaagcatggaagaagcaaagaagctgcagaaatttttcattccatggctgcaaaaggccacaagcctaacatcgttacgtatcgtgttctgcttcacgggtatgccgctgagggattctttgcagatatgattgatctctttaattcaatcgcaaacaatggtattgtacccgattgccacgttttcaacatattaattaatgcatatgctaaatgtggaatgatggatgaagctatgtcaatgcttactgaaatgcggggacaaggagtgagtccggatgtgttcacctatgcaactgtaatagctgcactttgcagaatgggtaggttgactgatgttatggacaattttaatcggatgattgggaagggagtacaaccgagcaaagttgtttatcactccctaattcagggtttctgtacgcttggtgatctggtgaaagtgaagaagttgatttttgaaataacggacaaaggtattcctcaccctaacattgtcttcttcagttcaataatgcatagtctgtgcaacgaaggaagggttatggacgcacaccatatctttgacttggttatagacattggtgagagacctgatctcattacatttaatatgctgattgacggatattgcttagtcagcaagatggaggaagcactccgactacttgattccatggtatcagctggcattaagccaaatgtgattacatataatacacttattaatggctattgtaggagtggaaggcttgatgatggcgttattctattcagagaaatgttgcataccagagttaaacctaacactgttacatataacatcatactggatgggttatttcgtgctggaagaactgttgctgcaaaaaagatgttccatgagatgatcgaaactggaacagcagtgagcatttccacatacagcatagttcttggaggactttgtaggaataactgcaccgatgaagcaatcgcttttttccagaaattagttgcaatgaatgtgaagttcgatattgtgatactcaataccatgattaaggcaatgtacaaggttcagagaagagaagaagctaacgatttgtttgcttcattaccagcctgtgggctggtacctaatgcctctacttacggagtagtaatacagaatcttctgaaagaaggatcgttggaagaagctgacaatatgttttcatcaatggagaagagtggttgtgctccaagctctcgtcttgtaaatgatatcaccagaaaattattggaaaagggggagatagtcaaggccggaaattatatgtcgaaagttgacgggaagatcatctcctttgaagcttcaaccacttcgttgttgttgtctctcttttcggagaaaggcaaatatcgggaacaattacaattgctccccgcgaaataccaattttttgagggagtcatt

SEQ ID NO: 2060 - DNA, 1821 bp, Triticum aestivum; identical to SEQ ID NO: 2058

SEQ ID NO: 2061 - DNA, 1821 bp, Triticum aestivum; identical to SEQ ID NO: 2055

SEQ ID NO: 2062 - DNA, 921 bp, Triticum aestivum
atgtccaagcttggttgtgtgcctgatgccatctcatacaacacagttcttaagagcttatgtgataatagcagcagccagcgggcgctcgacctccttcagatgatgatgaaaggaggtggctgctcccctgacgtagtgacatacaacacggtcatccatggcttcctgcaggaaggggaagtaagcaaggcatgcgatcgataccatgaaatggtgcagcaaggggttctgcatgatgtggtgacatataattcgattcttgatgcgctgtgcaaggcaggagctatggacaaggctgagttgttccttcggcagatggttgatgatgatattcgaccgaatgaagtgacatataatgcaatgatccatggatattccactttgggccagtggaaaaaggcgactcaaatgtttagagaaatgacaagccgtggtcttgctccaaatattgttacttggagctcgttgatgacctccctctgcaagcatggaagaagcaaagaagctgcagaaatttttcattccatggctgcaaaaggccacaagcctaacatcgttacgtatcgtcttctgcttcatgggtatgccgctgagggattctttgcagatatgattgatatctttaattcaatggcaaacaatggtattgtacccgattgccacgttttcaacatattaattaatgcatatgctaaatgtggaatgatggatgaagctatgtcaatgcttactgaaatgcggggacaaggagtgagtccggatgtgttcacctatgcaactgtaatagctgcactttgcagaatgggtaggttgactgatgctatggacaattttaatcggatgatcgggaagggagtacaaccgagcaaagttgtttatcactccctaattcagggttctgtatgcatggtgatctgg

SEQ ID NO: 2063 - DNA, 2088 bp, Triticum aestivum; identical to SEQ ID NO: 2059

SEQ ID NO: 2064 - DNA, 1395 bp, Triticum aestivum; identical to SEQ ID NO: 2056

SEQ ID NO: 2065 - DNA, 777 bp, Triticum aestivum; identical to SEQ ID NO: 2054

SEQ ID NO: 2066 - DNA, 2088 bp, Triticum aestivum; identical to SEQ ID NO: 2059

SEQ ID NO: 2067 - DNA, 1821 bp, Triticum aestivum; identical to SEQ ID NO: 2055

SEQ ID NO: 2068 - DNA, 2088 bp, Triticum aestivum; identical to SEQ ID NO: 2059

SEQ ID NO: 2069 - DNA, 1707 bp, Triticum aestivum
atgatcaacctgggagttcaacctgatgcggtgacctacagctcatttatcaacgcactaagcaagtccggagcaatggacaaggcagaagtggtccttcggcaaatggttgatcaaggcattgtacccaatatcattacgtatactagtctgatccatgaatattccacttcgggtcagtggaaagcagcagttaggatattcaaagaaatgacaagtaccggtgttcgaccaaattctgtcacgttgaactcatttattgattccctttgcaagcatagaaagacaaaggaagctagagatatttttgactccatggccgcaaacggccacaaacctgatattttctcctactctactttgcttaacgggtatgtgaaagaaggatgcttcgatgatatgactgatctcttcaattcgatggtacggaatggtattgtacctaaccaccatgttttcaacatactgatcaatgcatatgctaaacgtggactgatggataaggctatgcacatgttcgaagtaatgaggcaacaaggagtaaacccagatgtatttagctatcaaattgtaatggattcactttgcaaaatgggcaggatggatgccgctctggacaaatttaatcagatggtcaatcaaggagtttcacctaacaaagctgtttaccaatgcctggttctgggttcttgctctcatggtcattttgtgaaagccaaggaattgatctctgaagcaattaatagaggtctgtattctaacagtgtgttcttctatcgtgtaataaacgacctttgcaaagaaggaaaggtaaacgaggcacaggatatgtttgacttcatcctaggtattggtcagcgacctgatgtgattatgtacacttcactgatggatggatattgccttgttggcgaggtggagaaagcactgagtgtactcgatgctatgaaatctgctggccttcaacctgatgatgttgtatatggtacacttcttaacggttactgtaaaattggaaggattgccgatggattgagccttttcagggaaatgtcactcagcgtggttaagcccacgactattatatacaacattatactggatgggctgttttgctctgggagaacagtttgtgcaaaggaaaattttgatatgatgattgaaagtggcataccagtgggcgttgacacatacaatatagttcttcatggactttgtagaaacaattgcactgatgaagcaatagagctgttcaagaaattatgtgctatgaatgtgaagattaatgtcataacactcaataccatgatttctgcattgtttaaaactaggagaattgaagaagccaaggatttgtttgctactatatcagccattgggttggtgccttctgttgtgacttacagtgtaatgatgacaaatttcataaaagaagggttgctggcagatgctgatgatatgttttcagcaatggagaaggctggctgtgctcccaactccagactgctaaatcaagtggtcagggtatttctgaagaatggtgaagttgtaaaggctgtgacttatcttgctaaacttgatgcaaaacagctgtcacttgaagcttcgacggtttcgttaatagtatctctcttctcaaggaaagggaaattaaggaagcatgtaaaattgcttccggtaaagtaccagcctcctgagatgttggac

SEQ ID NO: 2070 - DNA, 1884 bp, Triticum aestivum
atggactgttgctgccgcgcacaccgcctcgatctggcatttgctttcttcggccgtctcctcaggacgggactgaaggcaggcgtcatagaagtcaacactctcctcaaaggactctgccacacaaagcgggcggatgaggccatggaagtgcttcttcacaggatgcctgagctgggctgcacccctgacgtggtggcatataccacggtcatccatggcttctttaaggaaggccaagtaggcaaggcatgcagcctgttccatggcatggcgcagcagggcgttgcgcctgatgtcatgacatatagctcggttattgatgcgctgtgcaaggccaaagcaatggacaaggcagagtatttccttcgtcagatggttgataatggtgtcgtacctgataatgtcacatataatagcctcatccacggatattcctcttcaggccattggaaggaggcggtaagggtgctgaaagaaatgacaagtcaaggtatcatacctgatatcgtttcataccgtattctgcttcatgggtatgccaccgaagggtgcttagttgatatgattaatctcttcaattcaatggcaagatactgtattctacctgattgtcatatcttcaacatactgattaatgcatatgctaaatctgggaagcttgataaggctatgcttatatttagagaaatgcagaaacaaggagtgagtccagatgcagtcacatattcaaccgtaatacatgcattttgcaaaaatggcaggttggacgatgctgtgataaagtttaatcaaatgattgatacaggagtacaaccgaacacatctgtttataatgccctaatccaggggttttctacgaatggcgatttggtgaaggcaaaggaattggttacggaaatgatgaacaaaggtatgcatcctcctgatattaaggtcttccattcggtaatgcagaacctatgcacagaaggaagggtaacagaagcacgggatatccttgacttgatagtgcacataggtatgaggcctgatgttttcacatttactttactgattggtggatactgcctagtcggcaagatggaggatgcctcaaaaatatttgatgatatgatgtcatatggtttagaaccttgtaacattacgtatggtatacttattaatggctattgcaaaaatagaaggattgatgacgggcttattctgttcaaagagatgctgcacaagggacttaaacctacaacttttaattataacgtcatactggatggattatttctggctggacgaactgttgctgcaaaggaaaagtttgacgagatggttgaatctggagtaagtgtgtgcattgatacatattcgatagttcttggtggactttgtagaaataattgtagcggcgaagccattacgctattccagaaattaagcaaaatgaatgtgaaattcaatattagaattgtcaatttcatgattgatgccttcttcagggttcagcgaaagcaagaagctgaggatttgtttgctgcaatatcagcaaatgggttggttgctaatgtttttacctacagcctaatgatgacaaatcttataaaagaagggtcagcggaaaaagctgacactctctttttatcgatggagaagagcggctgtactgccaactcgtggatgttaaatcttattatcagaaggctactggaaaaaggagagatagtgaaggctggaaattatatggctaaagttgatgcaaagagctactcacttgaagctaaaactgtttcgctgctgatttctctcttttcagggaaagggaaatacagagaacacataagattgctgcctacaaagtatcagtttcgtgaagaagcagccacagttgaa

SEQ ID NO: 2071 - DNA, 2004 bp, Triticum aestivum
atggattgctgctgctgccgcgcacaccgcctggatctggcgctcgccttcttcggccatctcctcaagacgggcctggaggcagaccaagtcgtcttcaacaccctcctcaaaggcctttgccacgcaaagcgggcggatgaggctctggacgtgctgcttcacaggatgactgagctgggctgcacccccaacgtggtggcgtataacaccataatccatggcttctttaaggaaggtcaagtaagcaaggcatgcaatctgttccatgaaatggcgcagcagggcgttaagcctaatgtggtgacatataactcagttatcgatgcgctgtgcaaggccagagccatggacaaggctgaggtggtccttcgccaaatggttgataatggtgtcgtacctgataatgtcacatataatagcctcatccatggatattcctcttcaggccattggaaggaggcagttagggtattcaaagagatgacaagtcggagggttacagcagatgcgcatacttacaacatgtttatgacctttctttgcaaacatggaagaagcaaacaagctgcaggaatttttgattccatggctatgaagggcctgaaacctgacaacatttcatatgctattctccttcatgggtatgccaccgaaggatgcttagttgatgtgattaatctcttcaattcaatagaaagagactgtattctaccagactctcgtatcttcagcatactgattaatgcatatgctaaatctgggaagcttgataaggctatgcttatatttagagaaatgcagaaacaaggagtgagcccagatgcattcacatattcaactttaatacatgcattttgtaaaaagggtcggttggacgatgctatgataaagtttaatcagatggttgatacaggagtacgacagggcacagctgtttatggttctctaatccagggtttttgtacacacggcgatttggtgaaaggaaaggaattggttactgaaatgatgaacaaaggtatacctcctcctgatattatgttcttccattcaatcatgcagaacctatgcacagaaagaagggtagtagaagcacgggatatccttggcttgatagcacacataggtatgaggcctaatgtttgcacatttaatatactgattggtggatactgcctagtccgcaagatggaggatgcctcaaaaatatttcatgatatgatgtcatatggtttagaaccttctaatgttacgtatggtatacttattaatggctattgcaaaaacagaaggattgatgacgggctgattctgttcaaagaaatgttgcgcaagggacttaaacctacaacttttaattacaacatcatactggatggattatttctggctggacgaactgttgctgcaaaggaaaagtttgatgagatggttgaatctggagtaagtatgtgcatcagtacttactctatagttcttcgtggactttgtagaaataattgtagcggcgaagccatcacgctattccagaaattaagcgcaatgcatgtgaaattcaatattagaattgtcaatatcatgattgatgccttcttcagggttcagcgaaagcaagaagctaaggatttgtttgctgcactaacagccaatgggttggttgctaatgtttttacctacagcctaatgatgacaaatcttataaaagaagggtcagtggaagaggctgacacactctttttatcgatggagatgagcggctgtacttcgaactcgtggatgttaaatcttattatcagagggttgctggaaaaaggagagatagtcaaggctggatgttatatgtctaaagttgatgcgaagagctactcacttgaagctaaaactgtttcgttgctgatctatctcttttcagggaaagggaaatacagagaacacataagattgctacctacaaagtatcagtttctcgaagaagcagccacagttgaatggtttgctata

SEQ ID NO: 2072 - DNA, 2004 bp, Triticum aestivum; identical to SEQ ID NO: 2071

SEQ ID NO: 2073 - DNA, 2004 bp, Triticum aestivum; identical to SEQ ID NO: 2071

SEQ ID NO: 2074 - DNA, 1680 bp, Triticum aestivum
atggactgctgctgccgcgcacaccgcgtggatctgacgctggccttcttcggcggtctccttaggacgggcttggaggcagaccaagtcatcttcagcaccctcctcaagggactctgccacgcaaagcgcacagatgaggctctcaacgtcctgcttcacaggatgactgagttgggctgcacccctaacgtggtggcgtatagcacggtcatccatggcttcttcaaggaaggccaagtaggcaaggcgtgcagcctgttccatgaaatggcgcagcagggcgttgcgcctaatttggtgacatatacctcggttattgatgcgctgtgcaaggccaaagcaatggacaaggcagagtatttccttcgtcagatggttgataatggtgtcgtacctaataatgtcacatataatagcctcatccatggatattcctcttcaagccattggaaggaggcggttagggtattcaaagagatgacaagtcggagggttacagcagatgtgcatacttataacatgtttatgacctttctttgcaaacatggaagaagcaaagaagctgcaggattttttgattccatggctatgaagggcctgaaacctgacaacgtttcatatgctattctccttcatgggtatgccaccgaaggatgcttagttgatatgattaatctcttcaactcaatggaaaaagactctattctacctaactgtcatatcttcagcatactgattaatgcatatgctaaatctgggaagcttgataaggccatgcttatcttcagtgaaatgcagaaacaaggagtgagtccagatgcagtcacatatttacccgtaatagatgcattttgcaaaaagggtaggttggacgatgctgtgattaagtttaatcagatgattgatatgggagtacgaccagacacagctgtttatacttccctaatccaagttttttgtacacacggcgatttgctgaaagcaaaagaattggttactgaaatgatgaacaaaggtatacctcctcctgatattaagttcttccattcaatcatgcagaacctatgcacagaaggaagggtaatagaagcacgtgatatccttggcttgatagcacacataggtatgaggcctaatgtttgcacatttaatatactgattggtggatactgtctagtccgcaagatggaggatgcctcaaaaatatttgatgatatgatgtcatatggtttagaaccttctaatattacgtatggtatacttattaatggctattgcaaaaacttaaggattgacgatgggctgattctgttcaaagaaatgttacggaagggagttaaacctacaacttttaattataacgtcatactggatgggttatttctggctggacgaactgttgttgcaaaggaaaagtttcatgagatggttgaatctggagtaagtgtgtgcatcggtacttactctatagttcttggtggactttgtagaaatagttgcagtagcgaagcagtcacactattccagaaacgaaaaggtgcgatagcacccgggagtctagactcccttttatctggtccgtacagccttgtaaagattcgtgccaggctctgtatagcagcagctcatttgcagcgtcaggatttgaccgcgacaaacaatagtgctcgtaggctg

SEQ ID NO: 2075 - DNA, 1650 bp, Triticum aestivum
atgcactcaaatgaggcattggatctgctgctccaccggatgcccgaactggactgtgcgcctgatgtcttctcgttcaacatagtaatcaacggctgctttagagaaggtgaagtagacaaagcatgcaatctcttccatgagatgccccaactgggagttcaacctgatgtggtgacctacaactcaattatcatcgcactaagcagggccggagcaatgggtaaggcagaagtggtccttcggcaaatggttgataaaggcattggacctgatgtcatgacatataacagtctgatccatggatattctactttgggtcagtggaaggcagcagttagggtattcaaagagatggtaagtgttggtgttctaccaaatgctgtcacgttgaactcatttatggattcactttgcaagcatagaaggacaaaggaagctagagatatttttgactccatggctgcaaagggccacaaacctaatattgcctcctactctactatgcttaatgggtatgcgaaacaaggatgcttcgatgatatgactggtctcttcaattccatggtacagaatgatattgtacctaacaaccatgttttcaacatactgatcagagcatattctacacgtggactgatggacgaggctatgcacatgttcgaagtaatgaagcaacaaggagtaaacccagatgtagttgactatctagtagtaatagattcactttgcaaaatgggcaggatggatgctgctatggacaaatttaatcagatggtcaatcaaggagtttcacctgacatagttgtttaccaatgcctggttctgggttcttgctctaatggtgattttgtgaaagccaaagaattgatttctgaagcagttaatcgaggtctgtgttctaacagtgtgttcttctatcctgtaataaacaacctgagcaaagaaggaaatgtaaaggatgcacaagatatgtttgacttcattgtaggtattggtcatcagcctgatgttattatgtacaattcactgatggatggatattgccttgttggcaaggtggaggaagcaatgacagtgcttgatgctatgaagtccgctggcctccaacctgatgctattacgtatgctatacttcttaatggctactgtaaaattggaaggatcgacgatggattgagtctttttagggaaatctcactcagcagggttaagcccacgactattatgtacaacattatacttgatgggctgttttgctgtgggagaacagtttttgcaaaggaagaattcgatacaatgattgaaagtggcataccggtgggcattgacacatgcaccatagttcttagtggactttgcaaaaataattgcactgatgaagcaatagagctgttcaagaagttatgtgcaatgaatgtgaagtttgatgtcataattctcactaccatgatttctgcaatgtttaagactaggagaattgaagaagccaaggatttgtttgctactatatcaaccatagggttggtgccttctgttgtgacttacagtgtaatgatgacgaatttcataaaagaagggtcgctggsmswskctgatkatatgttttwagcratggagaaggctrkywktctsgaggaccttacarag

SEQ ID NO: 2076 - DNA, 1857 bp, Triticum aestivum
atgcactcaaatgaggctttggacatgctgctccaccggatgcccgaactggactgtgcgcctgatgtcttctcgttcaacatagtaatcaacggctgctttagagaaggtgaagtagacaaagcatgcaatctcttccatgagatgccccaactgggagttcaacctgatgtggtgacctacaactcaattatcatcgcactaagcagggccggggcaatgggtaaggcagaagtggtccttcggcaaatggttgataaaggcattggacccgatgtcatgacatataacagtctgatccatggatattctactttgggtcagtggaaggcagcagttagggtattcaaagagatggtaagtgttggtgttctaccaaatgctgtcacgttgaactcatttatggattcactttgcaagcatagaaggacaaaggaagctagagatatttttgactccatggctgcaaagggccacaaacctaatattgcctcctactctactatgcttaatgggtatgcgaaacaaggatgcttcgatgatatgactggtctcttcaattccatggtacagaatggtattgtacctaacaaccatgttttcaacatactgatcagagcatattctacacgtggactgatggacgaggctatgcacatgttcgaagtaatgaagcaacaaggagtaaacccagatgtagttgactatctagtagtaatagattcactttgcaaaatgggcaggatggatgctgctatggacaaatttaatcagatggtcaatcaaggagtttcacctgacatagttgtttaccaatgcctggttctgggttcttgctctaatggtgattttgtgaaagccaacgaattgatttctgaagcagttaatcgaggtctgtgttctaacagtgtgttcttctatcctgtaataaacaacctgagcaaagaaggaaatgtaaaggatgcacaggatatgtttgacttcattgtaggtattggtcatcagcctgatgttattatgtacaattcactaatggatggatattgccttgttggcaaggtggaggaagcaatgacagtgcttgatgctatgaagtccgctggcctccaacctgatgctattacgtatgctatacttcttaatggctactgtaaaattggaaggatcgacgatggattgagtctttttagggaaatctcactcagcagggttaagcccacgactattatgtacaacattatacttgatgggctgttttgctgtgggagaacagtttttgcaaaggaagaattcgatacaatgattgaaagtggcataccggtgggcattgacacatgcaccatagttcttagtggactttgcaaaaataattgcactgatgaagcaatagagctgttcaagaagttatgtgcaatgaatgtgaagtttgatgtcataattctcactaccatgatttctgcaatgtttaagactaggagaattgaagaagccaaggatttgtttgctactatatcaaccatagggttggtgccttctgttgtgacttacagtgtaatgatgacgaatttcataaaagaagggtcgctggcagaggctgatgatatgtttttagcaatggagaaggctggctgtgctcctgactccagactgctaaatcacgtggtcagagtgttgctggagaaaggtgcagttgtaaaggctgcaacttatctcgctaaacttgatggaaaacagctgtcacttgaagcttcgacggtttcgttaatagtatctctcttctcaaggaaagggaaattaagggagcatgtaaaattgcttccggtaaagtaccagcctcctgagagttcgactgacaat

SEQ ID NO: 2077 - DNA, 1566 bp, Triticum aestivum
atgcactcaaatgaggcattggatctgctgctccaccggatgcccgaactggactgtgcgcctgatgtcttctcgttcaacatagtaatcaacggctgctttagagaaggtgaagtagacaaagcatgcaatctcttccatgagatgccccaactgggagttcaacctgatgtggtgacctacaactcaattatcatcgcactaagcagggccggagcaatgggtaaggcagaagtggtccttcggcaaatggttgataaaggcattggacccgatgtcatgacatataacagtctgatccatggatattctactttgggtcagtggaaggcagcagttagggtattcaaagagatggtaagtgttggtgttctaccaaatgctgtcacgttgaactcatttatggattcactttgcaagcatagaaggacaaaggaagctagagatatttttgactccatggctgcaaagggccacaaacctaatattgcctcctactctactatgcttaatgggtatgcgaaacaaggatgcttcgatgatatgactggtctcttcaattccatggtacagaatgatattgtacctaacaaccatgttttcaacatactgatcagagcatattctacacgtggactgatggacgaggctatgcacatgttcgaagtaatgaagcaacaaggagtaaacccagatgtagttgactatctagtagtaatagattcactttgcaaaatgggcaggatggatgctgctatggacaaatttaatcagatggtcaatcaaggagtttcacctgacatagttgtttaccaatgcctggttctgggttcttgctctaatggtgattttgtgaaagccaaagaattgatttctgaagcagttaatcgaggtctgtgttctaacagtgtgttcttctatcctgtaataaacaacctgagcaaagaaggaaatgtaaaggatgcacaagatatgtttgacttcattgtaggtattggtcatcagcctgatgttattatgtacaattcactgatggatggatattgccttgttggcaaggtggaggaagcaatgacagtgcttgatgctatgaagtccgctggcctccaacctgatgctattacgtatgctatacttcttaatggctactgtaaaattggaaggatcgacgatggattgagtctttttagggaaatctcactcagcagggttaagcccacgactattatgtacaacattatacttgatgggctgttttgctgtgggagaacagtttttgcaaaggaagaattcgatacaatgattgaaagtggcataccggtgggcattgacacatgcaccatagttcttagtggactttgcaaaaataattgcactgatgaagcaatagagctgttcaagaagttatgtgcaatgaatgtgaagtttgatgtcataattctcactaccatgatttctgcaatgtttaagactaggagaattgaagaagccaaggatttgtttgctactatatcaaccatagggttggtgccttctgttgtgacttacagtgtaattttttttttt

SEQ ID NO: 2078 - DNA, 1896 bp, Triticum aestivum
atggcattccagtcgactgctgctgccgtgctggccgcttggaccttggacactgctgccatgggacacgtcattaagttgggatttgcagaagaatctattgtcaatttcagccacctactcaaggccatctgtgcggagaagaagaccagctgtgcaatggacatcgtactacgagtaatgcctgagcttaactgcacacccaacattttctcctacagcattcttttcaagggtctctgcaacgagaagagaagccaagaggctctcgacctgattcacatcatggttgagcatggaggtagctgccaacctaatgtggtgtcctatagcaccgtaattgatggcttgttgaaagagggtgaagtgaacaaggcttacagtctattttgtgaaatgttacagaggagaatttcgccggatgttgtgacctgtagttcgattatttctggcatgtgcaagcttcatgcgatggacaaggctgaggacgttcttcaacagatgcttgatagaggaattctgccagatgttgctacatatactagtctaatgcatggatattattcattaggacagtgcgaggaggtggatcggattttcaaagaaatgtctagaaatggtgttcaaccagatattgtaacttctaatatacagatggattatctttgcaagaatggaagatgtgcagaagctaggaagatttttgattccatggtcagtttgggccaaaaaccgactgttactacctacagtattctgcttcatgggtatgctatggaaagatcttttcatgatatgaattgtctcattgatttgatggtgggaaatggtattgcgccaaatcattttatctacaacatactcatatctgcatacgctaaagaagaaatggttgatgatgtattgcatatatttacaaaaatgcggcagcaaggattgaaccctaatgttgtgaactatggagctgtaataaacttgctttccagttttggccgaatggatgatgctatgtcccaattcaatcaaatgatagctgaagggttagctcctgatatcatagtttttaaccctcttattaggggtttctgttcttgtggcaaatggaagaaggttcatgaactattttctgagatgttggatcgcggcatctatcccaacacagtgttcttcaacacaattatggatcgcctttgcaaatatggaagggttatggaagcccaagatctcttcgacctgatggtacacatgggtgtgaagcctgatgtgtgtacttataacacactgataggtggatacttgttcgttggtaagatggatgaagtgagcaagttacttgacaatatggtctcaattggcatggaaccagatgttatcacctataacatactgattgatggttactctaagaatggaaggatagatgatgcattggttgtttccagggaaatgttggccgggaaggttaagccttgtgttatcacttttaatattatgattggtgcattgcttaaatgtggcaggaaggaagaggctaaagatttgtttgatggtatctgggctaaaggattagtgcccaccgttgttacatatagcttaatgatacaaaaacttatagaagaaggttctctacaagagtctgatgatctatttgtttctatggagaagaatggatgtgctgccgactcccatatgctaaatgctatagttagaagcttatttcggaaaggggaggtgcccagggctgggacttatctgtctaaaattgatgagaggagcttcacccttgaagcttccacagctagcttgttgactgcacttgcttcagggggaaaaggccaggaatacaaggagttactccccgaaaaataccactcttttctggaacagggcactgat

SEQ ID NO: 2079 - DNA, 1896 bp, Triticum aestivum; identical to SEQ ID NO: 2078

SEQ ID NO: 2080 - DNA, 1896 bp, Triticum aestivum; identical to SEQ ID NO: 2078

SEQ ID NO: 2081 - DNA, 1938 bp, Triticum aestivum
atgtccgagctcggctgtgtgcataatgccttctcatactccattgttctgaagagcttatgcgacaatagcatgagtcagcgggggctcgacatgctccagatgatggcgaaagaaggaggtgtctgcttccccaacgtggtggcatatagcacggttatccatggcttctttaaggagggcgaaacaggcaaggcatgcaatctcttccacgaaatgatgcagcaagggcttgtgcccgatgtggtgacatacaactcaatcattgacgcgttgtgcaaggccagggcaatggacaaggcagagctagtccttcggcagatggttgctaatggtgctcaacccgatacagtgacatataattgcatgatcaatggatatgccacatctgggcggttgaaagagtctgctaaaatgttcagagaaatgaaaagccggggtcttatgccagatattgttacttgcaactccttcctgtcctccctttgcaagcatggaagaagcaaagaagctgcagaattttttgattccatgaccgccaagggccacaaaccggatatcgtctcatgccgtattttgcttcatgggtatgctactgaaggatgctttgctgatatgattgatctctttaactcagtgggaagcaacggcattgcagccgactgccgtgttttcaaaatattaattaatcgatatgctaaacgtggaatgacagatgaagctatgctgatatttactgaaatgcggggacaaggagtaagtccaaatgtagtcacctattccattgtaatagccgcactttccagaaaactttccagaatgggtaggttgaccgatgctatggacaaatttgatcagatggttgccttgggagtacagccggatagatctatttatcagtcccttattcagggcttttttatgcatggtggtttggttaaagctaaggagttggtttctcaaatgataaacaaaggtattcctcgtcctgacattgtgttcttcaattcagtaataaacagtatgtgcaaggaaggcagggttatggatgcacatgatatctttgacttggttatagacataggtgagaggcctgatgacatttcatttaattcactgattgacggatattgcttagtcgggaatatggataaagcatttaagatacttgatgccatggaagttggtgttgagcctgatgttattacatataatacacttgttaatggctattgtagaaatggaaggatcgatgatggtttggctctgtttagagaaatgccgcataagagaattaaacctgacactgtaacatatgacatcatactgaatgggttgtttcattctgggagcactgttgctgcaagaaaaatgttccatgagatgatcgaaagtggaataacagtgagcattcccacatatggtataataattgctggtttttgtagaaataattgtgcagaggaagctatcgacctattccataaactaagtgctatgaatgtgaagtttgatattgcaatacacaatactatgattaatgcgatattcaaggttgggagaagagaggaagctaaggatttgtttgctgcaatatcacccagtgggttggtgcccacggaatctacttatgcagtaatgataacaaatcttctagaagatggagtagtggaagaagcagacaatatgttttcatcaatggagaaaagtggtataatccccagctcccgtctgttaaattgtatcatcagaatgttgttggaaaaaggtgagattgccaaggccggaaattacttgtctaaagttgatgggaagagcattttacttgaagcatcaacaactttattgatgttgtctttgttttcgaagaaaggcaaataccgggaggacatgaaattgctccctgcaaagtatcaattttttatggacttggttgac

SEQ ID NO: 2082 - DNA, 1938 bp, Triticum aestivum
atgtccgagctcggctgtgtgcataatgccttctcatactccattgttctgaagagcttatgcgacaatagcatgagtcagcgggggctcgacatgctccagatgatggcgaaagaaggaggtgtctgcttccccaacgtggtggcatatagcacggttatccatggcttctttaaggagggcgaaacaggcaaggcatgcaatctcttccacgaaatgatgcagcaagggcttgtgcccgatgtggtgacatacaactcaatcattgacgcgttgtgcaaggccagggcaatggacaaggcagagctagtccttcggcagatggttgctaatggtgctcaatccgatacagtgacatataattgcatgatcaatggatatgccacatctgggcggttgaaagagtctgctaaaatgttcagagaaatgaaaagccggggtcttatgccagatattgttacttgcaactccttcctgtcctccctttgcaagcatggaagaagcaaagaagctgcagaattttttgattccatgaccgccaagggccacaaaccggatatcgtctcatgccgtattttgcttcatgggtatgctactgaaggatgctttgctgatatgattgatctctttaactcagtgggaagcaacggcattgcagccgactgccgtgttttcaaaatattaattaatcgatatgctaaacgtggaatgacagatgaagctatgctgatatttactgaaatgcggggacaaggagtaagtccaaatgtagtcacctattccattgtaatagccgcactttccagaaaactttccagaatgggtaggttgaccgatgctatggacaaatttgatcagatggttgccttgggagtacagccggatagatctatttatcagtcccttattcagggcttttttatgcatggtggtttggttaaagctaaggagttggtttctcaaatgataaacaaaggtattcctcgtcctgacattgtgttcttcaattcagtaataaacagtatgtgcaaggaaggcagggttatggatgcacatgatatctttgacttggttatagacataggtgagaggcctgatgacatttcatttaattcactgattgacggatattgcttagtcgggaatatggataaagcatttaagatacttgatgccatggaagttggtgttgagcctgatgttattacatataatacacttgttaatggctattgtagaaatggaaggatcgatgatggtttggctctgtttagagaaatgccgcataagagaattaaacctgacactgtaacatatgacatcatactgaatgggttgtttcattctgggagcactgttgctgcaagaaaaatgttccatgagatgatcgaaagtggaataacagtgagcattcccacatatggtataataattgctggtttttgtagaaataattgtgcagaggaagctatcgacctattccataaactaagtgctatgaatgtgaagtttgatattgcaatacacaatactatgattaatgcgatattcaaggttgggagaagagaggaagctaaggatttgtttgctgcaatatcacccagtgggttggtgcccacggaatctacttatgcagtaatgataacaaatcttctagaagatggagtagtggaagaagcagacaatatgttttcatcaatggagaaaagtggtataatccccagctcccgtctgttaaattgtatcatcagaatgttgttggaaaaaggtgagattgccaaggccggaaattacttgtctaaagttgatgggaagagcattttacttgaagcatcaacaactttattgatgttgtctttgttttcgaagaaaggcaaataccgggaggacatgaaattgctccctgcaaagtatcaattttttatggacttggttgac

SEQ ID NO: 2083 - DNA, 1938 bp, Triticum aestivum; identical to SEQ ID NO: 2081

SEQ ID NO: 2084 - DNA, 1914 bp, Triticum aestivum
atgagccgccgctttgtccccctcgacagacgcatcttggagcggaacatcaaggctcggtaccacgccggagacattggcacccaggacgcactccacctgttcgacgaattgctccacgttgctgggccttcctcggtccgcgccatcaactgcctcctcaccgtggttggccgtgattgccccgcgctcggcgtctccctcttcaaccgcgtcgcaagagcaaaggtgcctccccacaatgtcacctatggcattctagtcgactgctgctgccgtgctggccgcctggaccttggacacgctgccatgggacgcgtcattaagttgggatttacagcagaagctatcgtcaatttcagccacctactcaaggccatctgtgcagagaagaagaccagttatgcaatggacatcgtactccggataatgcctgagtttaactgcataccaaacattttctcctataacattcttttcaagggtctctgcaacgagaagagaagccaagaggctcttgatctgattcaagttatggttgaggatggaggttgctgccaacctgatgtggtgacctataacactgtaattgatggcttgttgaaagagggtgaggtaggcaaggcttacagcctattttctgaaatgctgcgtcagggggtatcaccgaatgttgtgacatgtaattcaatcatctctggcatgtgcaagcttcacgcgatggacaaggctgaggaggttcttcaacagatgcttgatagaggaattctgccagatgttgccacatataatagtctgatacatggatattattcattaggacagtgcgaagaggtggatcggattttcaaggagatgactacaaatggtgttcaaccagatattgtaacttacaatatacagatggattatctttgcaagaatggaagatgcgcagaagctaggaagatttttgattccatgatcagtttgggccaaaaacctactgttactacctacaacattctgcttcatgggtatgctatggaaagatcttttcatgatatgaattgtctcattgagttgatggatgataatggtatttcaccagatcattatggctacaacatactcatatctgcttatgctaaagaaaaaatggttgatgatgtattgcatatatttacaaaaatgcggcagcaaggattgaaccctgatgttgcgaactatggagcggtaataaacttgctttctagtattggccgaatggatgatgctatgtcccaatacaatcaaatgataaatgaagggttagctcctgatatcatagttttcaactcccttattagtggtttctgttcttgtggcaaatgggagaaggttcatgaactattttctgagatgttggatcgcggcatctgtcccaacacagtgttcttcaccactattatggaccgcctttgcaaaaatggaagggttatggaagcccaagatctcttcgacctgatggtacacatgggtgtgaagcctgatgtgtggacttataacacactgataggtggatacttgttcattggtaagatggatgaagtgagcaagttacttgacaatatgtgctcaattggcttgaaaccaaatgttttcacctatggcatactgatcgatggttactctaagaatggaagtatagatgatgcactggttgttatcagggaaatgttggacggtgttaagccttctattatcacttttaatattatgattggtgtgttgcttaaaggtagcaggatggaagaagccaaagatttgtttgacggtatctgggccaaaggattagtgcctgacgttgttacatatagcttaatgatacaaaaactaatagaagaaggttctctgactgtagtaaacttcttccatcaagctagtaaacttctc

SEQ ID NO: 2085 - DNA, 1914 bp, Triticum aestivum; identical to SEQ ID NO: 2084

SEQ ID NO: 2086 - DNA, 1914 bp, Triticum aestivum; identical to SEQ ID NO: 2084

SEQ ID NO: 2087 - DNA, 1845 bp, Triticum aestivum
atgagaatcttaaaatatgagacagtgatcacgtcaaccaaatatttaaataccaaacaaattcaaaatatccaacaaaattgcatgatgcatgcttgtacgaacaccacccaatcccatgcactccgagtaaaatgcatggtgcgctcaggcccagcaaatcggatcccagtcgcgccgagtccacacctccgtccaccgtcctcccgccgctggacgcgcccggtcggtcgtcgccggcgcgcgctcggactcaccgtcgccgcaggaagaagcgagcgacaccaccggacgcgcccgtcctccttccaccagagtaaggtcttggtcgttgcctcccgcattcaccgctgcagaaattggacggcgacaatgtcacgccttcaggtccgctctttctccagccccgtttcctcacgcgccaacgatctgctgagcgaactccaaggccatctgggcttcaggacgctcaggccagagctcgcgcaccaactgttcgaccaaatgatgcgccaacctgtcccagtatcagcgcgtgcactcaacggcttatttgctgccctcgcgcgtgcgccgccctccgccgcctgcaccgacggccctgccctcgccatcgatcttttcaaccgcatggcccgagcaggccgccgcagggtgatagcactcaccagtcacacctacagcatactaattgaatgctgctgccgcgtgcgccgtccggacctagggccttccttcttcgctcaccttctcaagacaggcgtcacggcaaacatcgtaatctatagtggcttaatcaagtgcctctgcgacttgaagtgcacagaggaggctctggatgtgctgctccacaggatgccgaacaacataagtgatgccatctcctactcagtaattctcaagagtttctgcgacagtgggaggagccagcttgcgcttgacctgctccacatgatggccaaaaaaggagctgaccactccccggatgtgcttgcatacaacatggtaattgatggcttctttaaggaaggtgaagtaagcaaaacatttgatctgttccatgaaatgatacagcaggggcctgtgcctgatgtggtgacgtatagcttctttatcaatgcgctatgcaaagcaagagcaatggacaaggcagaggtggttcttcgatcaatgattcataatggtgtccaaccagatgctgtgacatataatagcttgatccaaggatttttaacttcgggtcagctgaaagaagcctttaggttgttgaaactgatgacaaggcaaggtgttattccagacgttgttacctgcaactcagtcatggactacctttgcaagcatggaagagtcaaagaagctgcagaaatattttattccacggctgtgaagggccgaaaaccagatatagtctcatactctattatgctccatgggtacgctatagaaggatcccttgttaaaatgattgatctctgtgagatgatggcaagagatggagttgtacccgacctctcttgtttcaacatactgattaaggcatatgctaagtatggcaggatggatgtggccatgcttttctttgaagacatgttgaagcagggtgtgaagcctaatgaactcacttatttaactgtgatatctgcgttttgcaagatgggcaggatggatgatgcgatggaaaaattcagtgagatgattaatatgggagtaccacttgacacagaagtttacatgtgcatggttgagggttatttgaatcttggcgattccatgaaagccaaggaatttattaccaaaatgaagaacagggatattcatcataagccatggaaaggtaatcga

SEQ ID NO: 2088 - DNA, 1806 bp, Triticum aestivum
atgcctcgcttctcctccaccacgtcaatgtcgtcactccgcctccgcctccgcctccacgcccgccactcctcctccgcctcgcaaccctcacgcagccagggatgggatccccacgccgccttcgccgccgccacggagcgtgcgcgctccggcaacctcaccccggaggacgcacataacctgttcgacgaattgctgcggcagggcaatcctgtcctggagcgccccctcaacaaccttctcgccgccctcgcccgcgcgccggcgtccagcgcctgcggagacggccctgcactcgcggtcgccctcttcagccgcatatcccaaggtgcccgcctaagggtggcgcatccaacggcttgcacctacagcatcctcatggactgctgctaccgtgcacgctgccctgatctgtcactcgccttcttcggtcgtctcctcaggacgggcctgaaggcagaccaattcgttttcagcaccctcctcaagggactctgccacgcaaagcgctcagatgaggctctggacgtgctgcttcacaggatgcctgagctgggctgcactccctatgtggtggcgtataacaccgtcatccatggcttctttagggaaggccaagtaggcaaggcgtgcaatctattccatgaaatgaggcagcagggcgttacacctgatgttgtgacatataactcggttattgatgcgttgtgcaaggccaaagcaatggacaaggcagagtatttccttggtcagatggttgatgatggtgtcgtacctgataatgtgacatataatagcctcatccatggatattcctcttcaggccactggaaggaggctgttagggtattcaaagagatgacaagtcggagggttacagcagatgtgcatacttacaacatgtttatgacctttctttgcaaacatggaagaagcaaggaagctgcaggaatttttgataccatggctatgaagggcctgaaacctaacatcgtctcgtacagtactctgcttcatgggtatgccaccgaaggatgcttaattgatatgattaatctcttcaattcaatggaaagagactgtattctacctaactgtcatatcttcagcatactgattaatgcatatgctaaatctgggaagcttgataaggctatgcttatcttcaatgaaatgcagaaacaaggattgagtccagacgcattcacatatttacccgtaatagatgcattttgcaaaaagggtaggttggacgatgctatgattaagtttaatcagatgattgatacgggagtacgaccagacacagctgtttatacttccctaatccaaggtttttgtacacatggcgatttggtgaaagcaaaggaattggttactgaaatgatgaacaaaggtatacctcctcctgatattaagttcttccattcaatcatgcaaaacctatgcacggaaggaagagtaacaaaagcatgggatatccttggcttgatagcacacattggtatgaggcctaatgttgtcacatttagtgtacttgtcggtggatactgcctagtccgcaagatggcagatgcatcgaaagtatttgatgatatggtgtcatatggtttagaaccttgtaacattatgtatggtatacttattaatggctattgcaaaaatagaaggattgatgacgggcttattctgttcaaagagatgctgcacaagggacttaaacctacaacttttaattataacgtcatactgaatggattatttctggctggacaaactgttgctgcaaaagagaagtttgat

SEQ ID NO: 2089 - DNA, 1806 bp, Triticum aestivum; identical to SEQ ID NO: 2088

SEQ ID NO: 2090 - DNA, 1806 bp, Triticum aestivum; identical to SEQ ID NO: 2088

SEQ ID NO: 2091 - DNA, 1806 bp, Triticum aestivum; identical to SEQ ID NO: 2088

SEQ ID NO: 2092 - DNA, 1806 bp, Triticum aestivum; identical to SEQ ID NO: 2088

SEQ ID NO: 2093 - DNA, 1806 bp, Triticum aestivum; identical to SEQ ID NO: 2088

SEQ ID NO: 2094 - DNA, 1854 bp, Triticum aestivum
atgagccagcgggcgctcgacctgctccagatgatggcgaaagaaggaggtggctgctcccccaacgtggtggcgtatagcacggtcatccgtggcttttttaaggaaggtgaaacaggcaaggcatgcaatctgttccatgaaatgatgcagcaaggtgttgagcccagtgtgtggacatatagctcaatcattgatgcattgtgcaaggccagagcaatggacaaggcagagctagtgcttcagcagatggttaacaaaggtgttcaacccaataatgtgacatataattgcatgatccatggatattccacatctgggcagtcgaaagaggctgctaaattgcttagagaaatgaaaagccgggaccttataccagatattgtcactcgcaactcgttcctggcctccctttgcaagcatgggagaagcaaggaagctgcagaatttcttgattccatgactgccaagggccacaaaccagatatcgtatcataccgtattttgcttcatgggtatgccagtgaaggatgctttgctgatatgattgatctctttaattcaatggaaagcaacggtattgcagctgactgccatgttttcaacatattaattaatggatatgcaaaacgtggaatgacagaagaagctatgctgatatttactgaaatgcggggacaaggagtgagtccagatgtagtcacctattccattgtaatagccgcactttccagaatgggtaggctgaccgatgctattgagaaattcaatgagatgactgccttggaagtacagccggacacaactgtttatcactcactgattcagggttgttgcatagacggtgatttggttaaagctaaggagctgatgtttgaaatgatgaacggtggtattcctcggcctaacattgtgttcttcaattcagtaataaacagtctgtgcaaagaaggaagggttatggatgcacatgatgtcttagacttggttataggcataggtgagaggcctgatgtcattacatttaattcactgattgacggatattgcttagtcgggaagacggataaagcattcaaaatacttgatgtcatgaaatcagttggtgttgagtctgatgttgttacttatagtgcacttcttgatggctattttaaaaacagaaggattgatgatgctttgactttgtttagagaaatgccgcgtaagagaattaaacctggcactgttacatatggcatcatgttggatgggttgtttcgtgctgggagaactgttgccgcaaagaaaatgttccatgagatgaacgagagtggaacaacggtggacatttccacatacaatataatactgggaggtctttgtagaaataagtgtgcagacgaagcgatcacactgttccagaaattacgagcaatgaatgtgaagttaaatattaaaatactcaataccatgattaatgcaatgtacacggttcaaagaaaggaagaggctaaggatttgttttctgcaatgtcagccaatgggttggtgcccaatgaatctacttatgcagtaatgataagaaatcttctaaaagacggagcagtggaagatgctgacaatatgttttcatcaatggacaacagtggtatcattcccagttcctgtcttataaatgatatcatcagaatgttgttggaaaaaggtgagatagccaaggctggaaattatttgtctaaagttgatgggaagaggatctcacttgaagcttcaactacctcattgatgttgtctctcttttcaaggaaagggaaacatcaggaggatattaagttgctccctgcaaagtatcaatttttcgatggatttggt

SEQ ID NO: 2095 - DNA, 1854 bp, Triticum aestivum; identical to SEQ ID NO: 2094

SEQ ID NO: 2096 - DNA, 1854 bp, Triticum aestivum; identical to SEQ ID NO: 2094

SEQ ID NO: 2097 - DNA, 1854 bp, Triticum aestivum; identical to SEQ ID NO: 2094

SEQ ID NO: 2098 - DNA, 1854 bp, Triticum aestivum; identical to SEQ ID NO: 2094

SEQ ID NO: 2099 - DNA, 1854 bp, Triticum aestivum; identical to SEQ ID NO: 2094

SEQ ID NO: 2100 - DNA, 960 bp, Triticum aestivum
atggattatctttgcaagaatggaagatgcgcagaagctaggaagatttttgattccatggtcagtttgggccaaaaaccgactgttactacctacagcattctgcttcatgggtatgctatggaaagatcttttcatgatatgaattgtctcattgatttgatggtgggaaatggtattgctccaaatcattttatctacaacatactcatatctgcatacgctaaagaagaaatggttggtgaggtaatgcatatatttacaaaaatgcggcagcaaggattgaaccctgatgttgcgaactatgaagcggtaataaacttgctttctagtattggccgaatggatgatgctatgtcccaatacaatcaaatgataactgaaggattactccctggtatcatacttttcagccaacttattagtggtttccgtacttgtggcaaatgggagaaggttcatgaactattttctgaaatgttggatcgtggcatctatcccaacactgtgttcttgaacacaattatggatcatctttgcaaaaatggaagggttatggaagcccaggatctcttcgacctgatggtacacatgggtgtgaaacctgacgtgtgtacttatagcacactgataggtggatacttgttcgttggtcagatggatgaagtgagcaagttacttgacaatatggtctcaattggcttgaaaccaaatgttatcacatataccatattgattgatggttactgtaagaatggaaggatagatgatgcattggttgttttcagggaaatgttggccgggaaggttaagccttgcattatcacttttaatattatgattggtgcgttgcttaaaggtggcaggaaggaagaggctaaagatttgtttgatggtatctgggccaaaggattagtgcccaccgttgttacatatagcttaatgatacaaaaacttata

SEQ ID NO: 2101 - DNA, 1863 bp, Triticum aestivum
atgagccgccgcgtcgtccccgtcggcaggcgcatcttggagcagaacatcaaggctcggtaccacgccagagacattggcaccgaggatgcactccacctgtttgacgaattgctccaggatgctcagccctcctcgatccatgccatcaactgcctcctcaccatcatccgccgtgattgccctgcactgggcgtctccctcttcaaccgcatcgcaagggccaaggtggcacccgacattatcacctatggcattctagtccaatgctgctgccgtgctggccgcttggaccttggacatgctgccatgggacacatcattaagttgggatttgcagcagaatccatcgtcaatttcaatcacctactcaaagccatctgcgccgagaagaagaccagctacgcaatggacatcgtactccggctaatgcccgagtttaactgcataccaaacattttctcctacaacattcttttcaagggtctctgcaacgagaagagaagccaagaggctcttgagctgattcaaattatggttgaggatggaggttgctgccgacctgatgtggtgacctataacactgtagtcgatggcttgttgaaagagggtgaggtaggcaaggcttacagcctattttctgaaatgctacatagggggatttcgccaaatgctgtgacctatagctcaatcatctgtggcatgtgcaggcttcatctgatggacaaggctgaggaggttcttcaacagatgtttgatagagaaattctgccagatgttgctacatatactagtctaatacatggatattattcattaggacagtgcgaggaggtggatcggattttcaaagaaatgtctagaaatggtgttcaaccagatatcgtaacttataacatacagatggattatctttgcaagaatggaagatgcgcagaagctaggaagatttttgattccatggtcagtttgggccaaaaaccgactgttactacctacagcattctgcttcatgggtatgctatggaaagatcttttcatgatatgaattgtctcattgatttgatggtgggaaatggtattgctccaaatcattttatctacaacatactcatatctgcatacgctaaagaagaaatggttggtgaggtaatgcatatatttacaaaaatgcggcagcaaggattgaaccctgatgttgcgaactatgaagcggtaataaacttgctttctagtattggccgaatggatgatgctatgtcccaatacaatcaaatgataactgaaggattactccctggtatcatacttttcagccaacttattagtggtttccgtacttgtggcaaatgggagaaggttcatgaactattttctgaaatgttggatcgtggcatctatcccaacactgtgttcttcaacacaattatggatcatctttgcaaaaatggaagggttatggaagcccaggatctcttcgacctgatggtacacatgggtgtgaaacctgacgtgtgtacttatagcacactgataggtggatacttgttcgttggtcagatggatgaagtgagcaagttacttgacaatatggtctcaattggcttgaaaccaaatgttatcacatataccatattgattgatggttactgtaagaatggaaggatagatgatgcattggttgttttcagggaaatgttggccgggaaggttaagccttgcattatcacttttaatattatgattggtgcgttgcttaaaggtggcaggaaggaagaggctaaagatttgtttgatggtatctgggccaaaggattagtgcccaccgttgttacatatagcttaatgatacaaaaacttata

SEQ ID NO: 2102 - DNA, 1863 bp, Triticum aestivum; identical to SEQ ID NO: 2101

SEQ ID NO: 2103 - DNA, 1866 bp, Triticum aestivum
atgaggctctggacattctgcttcacaggatgcctgagcttggctgcacccctgacgtggtggcgtgacgtggtggcgtataacacggtcatccatggcttctttaaggaaggccaagtaggcaaggcatgcaatctgttccatggaatggcgcagcagggcgttgcgcctaatttggtgacatataactcggttattgatgcgttgtgcaaggccaaagcaatggacaaggcagagtatttccttggtcagatggttgatgatggtgtcgtacctgataatgtgacatataatagcctcatccatggatattcctcttcaggccactggaaggaggctgttagggtattcaaagagatgacaagtcggagggttaaaccaaatgtgcatactcacaacatgtttatgacctttctttgcaaacatggaagaagcaaagaagctgcaggaatttttgataccatggctatgaagggcctgaaacataacaacgtttcatatgctattctccttcacgggtatgccaccgaaggatgcttagttgatatgattaatctcttcaattcaatggaaagagactgcattctacctgactgtcgtatcttcagcatactgattaatgcatatgctaaatctgggaagcttgataaggccatgcttatcttcaataaaatgcagaaacaaggagtgagtccaaatgcagtcacatattcaactgtaatagatgcattttgcaaaaagggtcaattggacgatgctatgataaagtttaatcagatgattgatacaggagtacgacagggcacagctgtttatggttctctaatccagggtttttgtacacactgcgatttggtgaaagcaaaggaattgcttactgaaatgatgaacaaaggcatgcttcctcctgatattgcattcttcaattcaatcatgcagaacctttgcacagaaggaagggtaatagaagcacgggatgtccttggcttgatagcgcacataggtgtgaggcctgatgtttgcacatttaatatactgatcggtggatactgcctagtcggcaagatggaacatgcctcaaaaatatttgatgatatgatgtcatatggcttagaaccttctaatattacgtatggtatacttattaatggctattgcaaaaatagaaggattgatgacgggcttattctgttcaaagagatgctgcacaagggacttaaacctacaacttttaattataacgtcatactggatggattatttctggctggacgaactgttgctgcaaaggaaaagtttgatgagatggttgaatctggagtaagtgtgtgcattggtacatattcgatagttcttggtggactttgtagaaataattgctttagcgaagcaatcatgctgttccagaaattaagggcaatgaacatgaaattcaatattagaattgtcaatatcatgattgatgccttctttagggttcagagaaagcaagaagctaaagatttgtttgccgcaataccagccaatggcttggtagctaatgttgttacctacagcataacgatgacaaatcttataaaagaaggttcagtggaagaagctaacactctctttttatcaatggagaagagtggctgtactgccaacgcttggatgttaaatcatactatcagaaggttactggaaagaggagagatagtcaaggctggaaattatatgtctaaagttgatgcaaagagctactcacttgaagctaaaactgtttcattgctgatctctctcttttctgggaaagggaaatatagagaacacataggattgctccctacaaagtatcagtttcgtgaagaagcggccacagttgaa

SEQ ID NO: 2104 - DNA, 1866 bp, Triticum aestivum; identical to SEQ ID NO: 2103

SEQ ID NO: 2105 - DNA, 1866 bp, Triticum aestivum
atgaggctctggacattctgcttcacaggatgcctgagcttggctgcacccctgacgtggtggcgtgacgtggtggcgtataacacggtcatccatggcttctttaaggaaggccaagtaggcaaggcatgcaatctgttccatggaatggcgcagcagggcgttgcgcctaatttggtgacatataactcggttattgatgcgttgtgcaaggccaaagcaatggacaaggcagagtatttccttggtcagatggttgatgatggtgtcgtacctgataatgtgacatataatagcctcatccatggatattcctcttcaggccactggaaggaggctgttagggtattcaaagagatgacaagtcggagggttaaaccaaatgtgcatactcacaacatgtttatgacctttctttgcaaacatggaagaagcaaagaagctgcaggaatttttgataccatggctatgaagggcctgaaacataacaacgtttcatatgctattctccttcacgggtatgccaccgaaggatgcttagttgatatgattaatctcttcaattcaatggaaagagactgcattctacctgactgtcgtatcttcagcatactgattaatgcatatgctaaatctgggaagcttgataaggccatgcttatcttcaataaaatgcagaaacaaggagtgagtccaaatgcagtcacatattcaactgtaatagatgcattttgcaaaaagggtcaattggacgatgctatgataaagtttaatcagatgattgatacaggagtacgacagggcacagctgtttatggttctctaatccagggtttttgtacacactgcgatttggtgaaagcaaaggaattgcttactgaaatgatgaacaaaggcatgcttcctcctgatattgcattcttcaattcaatcatgcagaacctttgcacagaaggaagggtaatagaagcacgggatgtccttggcttgatagcgcacataggtgtgaggcctgatgtttgcacatttaatatactgatcggtggatactgcctagtcggcaagatggaacatgcctcaaaaatatttgatgatatgatgtcatatggcttagaaccttctaatattacgtatggtatacttattaatggctattgcaaaaatagaaggattgatgacgggcttattctgttcaaagagatgctgcacaagggacttaaacctacaacttttaattataacgtcatactggatggattatttctggctggacgaactgttgctgcaaaggaaaagtttgatgagatggttgaatctggagtaagtgtgtgcattggtacatattcgatagttcttggtggactttgtagaaataattgctttagcgaagcaatcatgctgttccagaaattaagggcaatgaacatgaaattcaatattagaattgtcaatatcatgattgatgccttctttagggttcagagaaagcaagaagctaaagatttgtttgccgcaataccagccaatggcttggtagctaatgttgttacctacagcataacgatgacaaatcttataaaagaaggttcagtggaagaagctgacactctctttttatcaatggagaagagtggctgtactgccaacgcttggatgttaaatcatactatcagaaggttactggaaagaggagagatagtcaaggctggaaattatatgtctaaagttgatgcaaagagctactcacttgaagctaaaactgtttcattgctgatctctctcttttctgggaaagggaaatatagagaacacataggattgctccctacaaagtatcagtttcgtgaagaagcggccacagttgaa

SEQ ID NO: 2106 - DNA, 1866 bp, Triticum aestivum; identical to SEQ ID NO: 2105

SEQ ID NO: 2107 - DNA, 1866 bp, Triticum aestivum
atgaggctctggacattctgcttcacaggatgcctgagcttggctgcacccctgacgtggtggcgtgacgtggtggcatataacacggtcatccatggcttctttaaggaaggccaagtaggcaaggtatgcaatctgttccatggaatggcgcagcagggcgttgcgcctaatttggtgacatataactcggttattgatgcgttgtgcaaggccaaagcaatggacaaggcagagtatttccttggtcagatggttgatgatggtgtcgtacctgataatgtgacatataatagcctcatccatggatattcctcttcaggccactggaaggaggcagttagggtattcaaagagatgacaagtcggagggttacagcagatgtgcatactcacaacatgtttatggcctttctttgcaaacatggaagaagcaaagaagctgcaggaatttttgataccatggctatcaagggcctgaaacctgacaacgtttcatatgctattctccttcatgggtgtgccaccgaaggatgcttagttgatatgattaatctcttcaattcaatggcaacagactgtattctacctaactgccatatcttcaatatactgattaatgcatatgctaaatctgggaagcttgataaggctatgcttatcttcaatgtaatgcagaaacaaggagtgagtccagatggagtcacctattcaactgtaatacatgcattttgcaaaatgggtagcttggacattgctatggacaaatttaaccagatggttgatatgggagtacgaccgaatgcaattgtttatcattccctaatccagggtttttgtacacatggggatttagtgaaagcaaaggaattggttgctgaaatgaggaacaaagctatgcgtcctcctgatattaagttcttccattcaataatgcagaacctatgcacggaaggaagggtaatagaagcacgggatatcctcgacttgatagtgcgcattggtatgaggcctgatgttcccatctttaatttactgatcggtggatactgcctagtccgcaagatggcagatgcatcaaaaatatttgatgatatggtgtcatatggtttagaaccttcaaatattacgtatggtatacttattaatggctattgcaaaaatagaaggattgatgacgggcttattctgttcaaagagatgctgcccaagggacttaaacctacaacttttaattataacgtcatactggatggattatttctggctggacgaactgttgctgcaaaggaaaagtttgatgagatggttgaatctggagtaagtgtgtgcattggtacatattcgatagttcttggtggactttgtagaaataattgtagcggcgaagcaatcacgctattccagaaattaagcacaatggatgtgaaattcaatattataattgtcaatataatgattgatgctttctacaaggttcagcgaaaccaagaagccaaggatttgtttgctgcagtatcagccaatggtttggtagctaatgtctttacctacaccataatgatgaaaaatcttataaaagaagggtcagtggaagaagctgacgatctctttttatcaatggagaagagcggctgtactgctgactcttatatgttaaatcttatcgtcagaatgttactgggaaaaggagagatagtcaaggctgggaattatatatctaaaattgatgcaaagagctactcacttgaagctaaaactgtttcgctgcttatctctctcttttcagggaaagggaaatatagagaacacataggattgctccctgcaaagtatcggtttcgtgaagaagcagcyacagttgtg

SEQ ID NO: 2108 - DNA, 1866 bp, Triticum aestivum
atgaggctctggacattctgcttcacaggatgcctgagcttggctgcacccctgacgtggtggcgtgacgtggtggcatataacacggtcatccatggcttctttaaggaaggccaagtaggcaaggtatgcaatctgttccatggaatggcgcagcagggcgttgcgcctaatttggtgacatataactcggttattgatgcgttgtgcaaggccaaagcaatggacaaggcagagtatttccttggtcagatggttgatgatggtgtcgtacctgataatgtgacatataatagcctcatccatggatattcctcttcaggccactggaaggaggcagttagggtattcaaagagatgacaagtcggagggttacagcagatgtgcatactcacaacatgtttatggcctttctttgcaaacatggaagaagcaaagaagctgcaggaatttttgataccatggctatcaagggcctgaaacctgacaacgtttcatatgctattctccttcatgggtgtgccaccgaaggatgcttagttgatatgattaatctcttcaattcaatggcaacagactgtattctacctaactgccatatcttcaatatactgattaatgcatatgctaaatctgggaagcttgataaggctatgcttatcttcaatgtaatgcagaaacaaggagtgagtccagatggagtcacctattcaactgtaatacatgcattttgcaaaatgggtagcttggacattgctatggacaaatttaaccagatggttgatatgggagtacgaccgaatgcaattgtttatcattccctaatccagggtttttgtacacatggggatttagtgaaagcaaaggaattggttgctgaaatgaggaacaaagctatgcgtcctcctgatattaagttcttccattcaataatgcagaacctatgcacggaaggaagggtaatagaagcacgggatatcctcgacttgatagtgcgcattggtatgaggcctgatgttcccatctttaatttactgatcggtggatactgcctagtccgcaagatggcagatgcatcaaaaatatttgatgatatggtgtcatatggtttagaaccttcaaatattacgtatggtatacttattaatggctattgcaaaaatagaaggattgatgacgggcttattctgttcaaagagatgctgcccaagggacttaaacctacaacttttaattataacgtcatactggatggattatttctggctggacgaactgttgctgcaaaggaaaagtttgatgagatggttgaatctggagtaagtgtgtgcattggtacatattcgatagttcttggtggactttgtagaaataattgtagcggcgaagcaatcacgctattccagaaattaagcacaatggatgtgaaattcaatattataattgtcaatataatgattgatgctttctacaaggttcagcgaaaccaagaagccaaggatttgtttgctgcagtatcagccaatggtttggtagctaatgtctttacctacaccataatgatgaaaaatcttataaaagaagggtcagtggaagaagctgacgatctctttttatcaatggagaagagcggctgtactgctgactcttatatgttaaatcttatcgtcagaatgttactgggaaaaggagagatagtcaaggctgggaattatatatctaaaattgatgcaaagagctactcacttgaagctaaaactgtttcgctgcttatctctctcttttcagggaaagggaaatatagagaacacataggattgctccctgcaaagtatcggtttcgtgaagaagcagctacagttgtg

SEQ ID NO: 2109 - DNA, 1875 bp, Triticum aestivum
atgatctgtctccacaagcgaagcaaagctatacagtccagtccagtccagtacgcgcacagcgcccgtcccgcctccccacgccgatgtcccagcctccacctcctccgccgccgctcctcctccttcactcccacctcgccgccctcacgctcctggtctccgcacgccgcctttgccgctgccacagagagcgtccgcgccgggacgctcagcccacaagacgcacaccagctgttcgaccaattgctgcggcagtccactccggtccccgggcaagccctgaacggcttcctcgccggccttgcccgtgcgcgagacaccgacgcctgcagagacggcccctcccttgccctcacgctcttcaaccgcgtatacggagaagaagccggtccacgggtggcgccgcccacagtccacacctacaacatcctgatgaactgctgctgccgcgtgggtcgttcagacctagggcttgcctacttcagccgcctcctaaggaccggcctcaaagcgaacgaggtcaccgccagcaccgtcctcaagtgcctctgctgtgcaaaaccggcagatgaagctgtgaacgtgctgcttcataggatgtccgtcctcggctgtgtgcctaattccttctcatacaacatagttctaaagagcttatgtgacgacagcaggagcgagcaagcactcgatctgctccaggtgatggcaaaaggagatgattgccccccccccaacgttctgtcatatagcacgctcatccacggcttctttaaggaaggcgaagtaggcaaggcatgcaatctattccatgaaatgatgcggcaaggggttgtgcctgatgtggtgacgtatagctcgattatcgatgcattgtgcaaggctggagcaatggacaaagcagagttgttccttcggcagatggttgatagcggtgttccaccgaataaggtgacgtatactagcatgatccatggatattccactttggactggtggaaagaggcgactaaaatgttcagagaaatgacaagcaggggtcttataccagatattgtcagttggaactcgttcatggactccctttgcaagcatggaagaagcaaagaagctgctgaaattttcgattccatggctgccaagggccacagacctaatattgtctcctacactattcttcttcatgggtatgccaatgaaggaagctttgctgatatgatgagtctcttcaattcaatggaaggtgacggtattgtggccaactgctatgttttcaacatattaattaatgcatatgctaaacgaagaatgatggatgaagctgtgctcatacttactgaaatgcggggacaaggactgagtccagatgtattcacctattcaactctaatatctgcactttgcaaaatgggtaggctggctgatgctatggataagttcagtcagatgattggtacaggagtacaaccagacacagttgtttatcaatccctaattcagggtttctgtacacatggcgagttagtatatgaaatgatgaacaaaggtattccttgtccaaacattgcattcttcagttcaatagtagacagtctatgcaaagaaggaagggttatggatgcacaccatatctttgacttggttaaagacataggtgagagacctgacatcattatgtttaatacgctgattgacggatattgcctagtcggtgagatgggcaaagcattcatggtacttgatgtcatgacatcagctggcattgagcctgatgccattacgtatagtacacttgtcagtggatattgtaaaagtggaaggatcgatggtgggttgattctgttcagagaaatgttgcataagaaatgttacata

SEQ ID NO: 2110 - DNA, 1875 bp, Triticum aestivum; identical to SEQ ID NO: 2109

SEQ ID NO: 2111 - DNA, 1713 bp, Triticum aestivum
atgccccaactgggagttcaacctgatgtggtgacctacacctcaatcatggacgcactaagcaagtccggagcaatggacaaggcagaagtgctccttcggcaaatggttgatcaaggaattgaacccaatatcaggacatatagctgtctgatccatggatattctacttttggtcagtggaaggaggcacttagggtattcaaagaaatggcaagtcttggtgttgtaccagacgttgtcacgttgagctcattaatcgattccctttgcaggcacagaaggacaaagcaagctagagaaatttttgactctatggctgcaaagggcctgaaacctaatatcgtctcctactctactatgcttaatgggtatgtcaaagaaggatccttcgaggatatgactgatctcttcaattcgatggtacggaatggtattgtacctaaccaccatattttcaacatactgatcaatgcatatgctaaacgtggactgatggatgaggctatgcacatgttcgaagtaatgaggcaacaaggagtaaacccagatgtatttggctatcaaatcataatggattcactttgtaaaatgggtaagatggatgctgctctggacaaatttaatcagatggtcaatcaaggagtttcacctaacaaagctgtttaccaatgcctggttctgggttcttgctctcatggtgattttgtgaaagccaaggaattgatttctgaagcggttaatagaggtctgtgttctaacagtgtgttcttctatcctgtaataaacgacctttgcaaagaaggaaaggtaaaggaggcacatgatatgtttgacttcatcctaggtattggtcagcggcctgatgtgattatgtacacttcactgatggatggatattgccttgttggcaaggtggaggaagcactgagagtacttgatgctatgaagtctgctggcctccaacctgatgtttttacatatggtacacttcttaatggctactgtaaaattggaaggatcgccgatggattgagtcttttcagggaaatgtcactcagcggggttaagcccactactattatgtacaacattatacttgatgggctgtttcgctccgggagaacagattctgcaaaggaagaattcgatacaatgattgaaagtggcataccggtgggcattgacacatgcaccatagttcttagtggactttgcaaaaataattgcactgatgaagcaatagagctgttcaagaaattatgtgcaatgaatgtgaagtttgatgtcataatactcaataccatgatttcttcaatgtttaagactaggagaattgaagaagccaaggatttgtttgctactatatcaaccatagggttggtgccttctgttgtgacttacagtgtaatgatgacgaatttcataaaagaagggtcgctggcagaggctgatgatatgtttttagcaatggagaaggctagctgtgctcccaactccatcctgctaaatcaagtggtcagggcgttgctgaaaaaaggtgcagttgtgaaggctgcaacttatctcgctaaacttgatgctaaacagctgtcagttgaagcctcaacgatttcgttaatagtatttctcttctcaggggaagggaaactaagggagcacgtagagttgcttccagtaaagtaccagcctcctgagagttcggctgacagt

SEQ ID NO: 2112 - DNA, 1713 bp, Triticum aestivum; identical to SEQ ID NO: 2111

SEQ ID NO: 2113 - DNA, 1821 bp, Triticum aestivum
atggcaaaagatagaggtggctgcttccctgatgtggtggcatataacacggtcatccatggctttttcaaggagggtgaaacaggcaaggcatgcaatctatttcatgaaatgatccatcaaggggttgagcccgatgtggtgacgtacaactcggtcgttgatgcgttgtgcaaggccagggcaatggacaaagcagagctagtccttcgtcagatggttgctgatggtgctcaacccaatgcagtgacatataattgcatgattaatggatatgccacatctgggcggttgaaagaggctgctaaaatgttcagagaaatgaaaagccggggccttataccagatatttttacttgcaactccttaatgacttacctttgcaagcatggaagaagcaaagaagctgcagaatttttttattcgatgacagcaaagggccacaaaccggatatcgtctcatactgtattttgcttcatgggtatgctactgaaggatgctttcctgatatgattgatgtctttaattcaatggaaaacaatggtattgcagccgacttccatgttttcaacatattaattgatgcatatgctaaacgtggaatgatggatgaagctatgctgatatcaagtaaaatgcaggaacgcagagtgaatcctgatatagtcacctattccagcataatagctggactttccagattgggtaggctgactgaggccatggaaaaattcaatcagatgattgccttgggagtacaaccgaacaaagttgtttatcacgcgctgattcagggtttttgcatagatggtgatttggctaaagctaagcagttggtttctgaaatgatgaacagaggtattcctcgtcctaacatttcgttctttagttcactaataaagagtctctgccaagaaggaagggttatggatgcccatgatatctttgacttggttatagacatgggtgagaggcctgatgacattttatttaattcactgattgacggatactgcttagtcaggaagatggataaagcattaaaagtacttgatgtcatggaatcagttggtgttgagcctgatgttattacatacaatacacttgttaatggctattgtagaaatggaaggatcggtgatggtttgactctgttcagagagatgccgcgtaagagaattaaacctgacactaattcatattgcgtcataatggatgggttgtttcgttctgggagaactgtttctggaagggaaatgttccatgagatgatcgaaagtggaacaacagtcagcatttccacatacaacgtaatactaggaggtctttgtggaaataattgtgcagacgaagcgattgccctgttccagaaattaggttcaatgaatgtgaagttcagtattgcaatagtcaataccatgatcgatgcaatgtacagggttgggagaagagaagaagctaaggaactttttgctggaatatcagccagtgggttggtgcctaatgaatctacttatggagtaatgattatgaatcttctaaaagatggagcagtggaagatgctaacaatgtgttttcatcaatggacaagagtggtatagtccccagctctcgtctgttaaatgatattatcagaatgttgttggaaaaagatgagatcgccaaggccggaaattatttgtctaaagttgatgggaagagcatctccctagaagcttcaacaacttcattaatgttgtctctcttttcaagagaagggaaatatcgggaggacatgaaattgcttcctgcaaagtaccaatttttcgatggattttgt

SEQ ID NO: 2114 - DNA, 1821 bp, Triticum aestivum
atggcaaaagatagaggtggctgcttccctgatgtggtggcatataacacggtcatccatggctttttcaaggagggtgaaacaggcaaggcatgcaatctatttcatgaaatgatccatcaaggggttgagcccgatgtggtgacgtacaactcggtcgttgatgcgttgtgcaaggccagggcaatggacaaagcagagctagtccttcgtcagatggttgctgatggtgctcaacccaatgcagtgacatataattgcatgattaatggatatgccacatctgggcggttgaaagaggctgctaaaatgttcagagaaatgaaaagccggggccttataccagatatttttacttgcaactccttaatgacttacctttgcaagcatggaagaagcaaagaagctgcagaatttttttattcgatgacagcaaagggccacaaaccggatatcgtctcatactgtattttgcttcatgggtatgctactgaaggatgctttcctgatatgattgatgtctttaattcaatggaaaacaatggtattgcagccgacttccatgttttcaacatattaattgatgcatatgctaaacgtggaatgatggatgaagctatgctgatatcaagtaaaatgcaggaacgcagagtgaatcctgatatagtcacctattccagcataatagctggactttccagattgggtaggctgactgaggccatggaaaaattcaatcagatgattgccttgggagtacaaccgaacaaagttgtttatcacgcgctgattcagggtttttgcatagatggtgatttggctaaagctaagcagttggtttctgaaatgatgaacagaggtattcctcgtcctaacatttcgttctttagttcactaataaagagtctctgccaagaaggaagggttatggatgcccatgatatctttgacttggttatagacatgggtgagaggcctgatgacattttatttaattcactgattgacggatactgcttagtcaggaagatggataaagcattaaaagtacttgatgtcatggaatcagttggtgttgagcctgatgttattacatacaatacacttgttaatggctattgtagaaatggaaggatcggtgatggtttgactctgttcagagagatgccgcgtaagagaattaaacctgacactaattcatattgcgtcataatggatgggttgtttcgttctgggagaactgtttctggaagggaaatgttccatgagatgatcgaaagtggaacaacagtcagcatttccacatacaacgtaatactaggaggtctttgtggaaataattgtgcagacgaagcgattgccctgttccagaaattaggttcaatgaatgtgaagttcagtattgcaatagtcaataccatgatcgatgcaatgtacagggttgggagaagagaagaagctaaggaactttttgctggaatatcagccagtgggttggtgcctaatgaatctacttatggagtaatgattatgaatcttctaaaagatggagcagtggaagatgctaacaatgtgttttcatcaatggacaagagtggtatagtccccagctctcgtctgttaaatgatattatcagaatgttgttggaaaaaggtgagatcgccaaggccggaaattatttgtctaaagttgatgggaagagcatctccctagaagcttcaacaacttcattaatgttgtctctcttttcaagagaagggaaatatcgggaggacatgaaattgcttcctgcaaagtaccaatttttcgatggattttgt

SEQ ID NO: 2115 - DNA, 1821 bp, Triticum aestivum; identical to SEQ ID NO: 2114

SEQ ID NO: 2116 - DNA, 1821 bp, Triticum aestivum
atggcaaaagatagaggtggctgcttccctgatgtggtggcatataacacggtcatccatggctttttcaaggagggtgaaacaggcaaggcatgcaatctatttcatgaaatgatccatcaaggggttgagcccgatgtggtgacgtacaactcggtctttgatgcgttgtgcaaggccagggcaatggacaaagcagagctagtccttcgtcagatggttgctgatggtgctcaacccaatgcagtgacatataattgcatgattaatggatatgccacatctgggcggttgaaagaggctgctaaaatgttcagagaaatgaaaagccggggccttataccagatatttttacttgcaactccttaatgacttacctttgcaagcatggaagaagcaaagaagctgcagaatttttttattcgatgacagcaaagggccacaaaccggatatcgtctcatactgtattttgcttcatgggtatgctactgaaggatgctttcctgatatgattgatgtctttaattcaatggaaaacaatggtattgcagccgacttccatgttttcaacatattaattgatgcatatgctaaacgtggaatgatggatgaagctatgctgatatcaagtaaaatgcaggaacgcagagtgaatcctgatatagtcacctattccagcataatagctggactttccagattgggtaggctgactgaggccatggaaaaattcaatcagatgattgccttgggagtacaaccgaacaaagttgtttatcacgcgctgattcagggtttttgcatagatggtgatttggctaaagctaagcagttggtttctgaaatgatgaacagaggtattcctcgtcctaacatttcgttctttagttcactaataaagagtctctgccaagaaggaagggttatggatgcccatgatatctttgacttggttatagacatgggtgagaggcctgatgacattttatttaattcactgattgacggatactgcttagtcaggaagatggataaagcattaaaagtacttgatgtcatggaatcagttggtgttgagcctgatgttattacatacaatacacttgttaatggctattgtagaaatggaaggatcggtgatggtttgactctgttcagagagatgccgcgtaagagaattaaacctgacactaattcatattgcgtcataatggatgggttgtttcgttctgggagaactgtttctggaagggaaatgttccatgagatgatcgaaagtggaacaacagtcagcatttccacatacaacgtaatactaggaggtctttgtggaaataattgtgcagacgaagcgattgccctgttccagaaattaggttcaatgaatgtgaagttcagtattgcaatagtcaataccatgatcgatgcaatgtacagggttgggagaagagaagaagctaaggaactttttgctggaatatcagccagtgggttggtgcctaatgaatctacttatggagtaatgattatgaatcttctaaaagatggagcagtggaagatgctaacaatgtgttttcatcaatggacaagagtggtatagtccccagctctcgtctgttaaatgatattatcagaatgttgttggaaaaagatgagatcgccaaggccggaaattatttgtctaaagttgatgggaagagcatctccctagaagcttcaacaacttcattaatgttgtctctcttttcaagagaagggaaatatcgggaggacatgaaattgcttcctgcaaagtaccaatttttcgatggattttgt

SEQ ID NO: 2117 - DNA, 1821 bp, Triticum aestivum; identical to SEQ ID NO: 2116

SEQ ID NO: 2118 - DNA, 1821 bp, Triticum aestivum; identical to SEQ ID NO: 2116

SEQ ID NO: 2119 - DNA, 1701 bp, Triticum aestivum
atgatccatcaaggggttgagcctgatgtggtgacgtacaactcggtcgttgatgcattgtgcaaggccagagcaatggacaaggcagaagtagtccttcagcagatggtcgataaaggtgttcaacctaatatagtgacatatacttgcatgatcaatggatattccacaactgggcggttgaaagaggctgctaaaatgttcagagaaatgaaaagccgaggtcttataccagatattgttacttgcaactcattaatgacttccctttgcaagcatggaagaagcaaagaagctgcagaagttttttattcgatgacagcaaagggccacaaaccggatatcgtctcataccgtattttgcttcatgggtatgctactgaaggatgctttcctgatatgattgatgtctttaattcaatggaaaacaatggtattgcagccgactgccatgttttcaacatattaattgatgcatatactaaacgtggaatgatagatgaagctatgctgatatcaagtaaaatgcaggaacgcagagtgaatcccgatatagtcacctattccagcataatagctggactttccagattgggtaggctgactgaggccatggaaaaattcaatcagatgattgccttgggagtacaaccgaacaaagttgtttatcacgcgctgattcagggtttttgcatagatggtgatttggctaaagctaagcagttggtttctgaaatgatgaacaaaggtattcctcgtcctaacatttcgttctttagttcagtaataaagagtctctgccaagaaggaagggttatggatgcccatgatatctttgacttggttatagacatgggtgagaggcctgacgccattttatttaattcactgattgacggatactgcttagtcaggaagatggataaagcattaaaagtacttgatgtcatggaatcagttggtgttgagcctgatgttattacatacaatacacttgttaatggctattgtagaaatggaaggatcgatgatggtttgactctgtttagagagatgccgcgtaagagaattaaacctgacactatttcatattgcgtcataatggatgggttgtttcgttctgggagaactgtttctgcaagggaaatgttccatgagatgattgaaaatggaacgacagtcagcatttccacatacaacgtaatactaggaggtctttgtagaaataattgtgcagacgaagcgattgccctgttccagaaattaggttcaatgaatgtgaagttcagtattgcaatagtcaataccatgatcgatgcaatgtacagggttgggagaagagaagaagctaaggaactttttgctggaatatcagctcgtgggttggtgcctaatgtatctacttatggagtactgattatgaatcttctaaaagatggagcagtggaagatgctaacaatgtgttttcatcaatggacaagagtggtatagtccccagctcccgtctcatgaatgacatcatcagattgttgttggaaaaaggtgagatcgccaaggccggatattatttgtctaaagttgatgggaagagcatatcacttgaagcttcaactacttcattgatgttttctctcttctcaaggaaagggaaatatatgaaggacatgaatttgctccctgcaaagtatcaatttttcgat

SEQ ID NO: 2120 - DNA, 1335 bp, Triticum aestivum
atgatccatcaaggggttgagcctgatgtggtgacgtacaactcggtcgttgatgcattgtgcaaggccagagcaatggacaaggcagaagtagtccttcagcagatggtcgataaaggtgttcaacctaatatagtgacatatacttgcatgatcaatggatattccacatctgggcggttgaaagaggctgctaaaatgttcagagaaatgaaaagccgaggtcttataccagatattgttacttgcaactcattaatgacttccctttgcaagcatggaagaagcaaagaagctgcagaagttttttattcgatgacagcaaagggccacaaaccggatattgtctcataccgtattttgcttcatgggtatgctactgaaggatgctttcctgatatgattgatgtctttaattcaatggaaaacaatggtattgcagccgactgccatgttttcaacatattaattgatgcatatactaaacgtggaatgatagatgaagctatgctgatatcaagtaaaatgcaggaacgcagagtgaatcccgatatagtcacctattccagcataatagctggactttccagattgggtaggctgactgaggccatggaaaaattcaatcagatgattgccttgggagtacaaccgaacaaagttgtttatcacgcgctgattcagggtttttgcatagatggtgatttggctaaagctaagcagttggtttctgaaatgatgaacaaaggtattcctcgtcctaacatttcgttctttagttcagtaataaagagtctctgccaagaaggaagggttatggatgcccatgatatctttgacttggttatagacatgggtgagaggcctgacgccattttatttaattcactgattgacggatactgcttagtcaggaagatggataaagcattaaaagtacttgatgtcatggaatcagttggtgttgagcctgatgttattacatacaatacacttgttaatggctattgtagaaatggaaggatcgatgatggtttgactctgttcagagagatgccgcgtaagagaattaaacctgacactatttcatattgcgtcataatggatgggttgtttcgttctgggagaactgtttctgcaagggaaatgttccatgagatgattgaaaatggaacaacagtcagcatttccacatacaacgtaatactaggaggtctttgtagaaataattgtgcagacgaagcgattgccctgttccagaaattaggttcaatgaatgtgaagttcagtattgcaatagtcaataccatgatcgatgcaatgtacagggttggg

SEQ ID NO: 2121 - DNA, 1701 bp, Triticum aestivum
atgatccatcaaggggttgagcctgatgtggtgacgtacaactcggtcgttgatgcattgtgcaaggccagagcaatggacaaggcagaagtagtccttcagcagatggtcgataaaggtgttcaacctaatatagtgacatatacttgcatgatcaatggatattccacatctgggcggttgaaagaggctgctaaaatgttcagagaaatgaaaagccgaggtcttataccagatattgttacttgcaactcattaatgacttccctttgcaagcatggaagaagcaaagaagctgcagaagttttttattcgatgacagcaaagggccacaaaccggatattgtctcataccgtattttgcttcatgggtatgctactgaaggatgctttcctgatatgattgatgtctttaattcaatggaaaacaatggtattgcagccgactgccatgttttcaacatattaattgatgcatatactaaacgtggaatgatagatgaagctatgctgatatcaagtaaaatgcaggaacgcagagtgaatcccgatatagtcacctattccagcataatagctggactttccagattgggtaggctgactgaggccatggaaaaattcaatcagatgattgccttgggagtacaaccgaacaaagttgtttatcacgcgctgattcagggtttttgcatagatggtgatttggctaaagctaagcagttggtttctgaaatgatgaacaaaggtattcctcgtcctaacatttcgttctttagttcagtaataaagagtctctgccaagaaggaagggttatggatgcccatgatatctttgacttggttatagacatgggtgagaggcctgacgccattttatttaattcactgattgacggatactgcttagtcaggaagatggataaagcattaaaagtacttgatgtcatggaatcagttggtgttgagcctgatgttattacatacaatacacttgttaatggctattgtagaaatggaaggatcgatgatggtttgactctgttcagagagatgccgcgtaagagaattaaacctgacactatttcatattgcgtcataatggatgggttgtttcgttctgggagaactgtttctgcaagggaaatgttccatgagatgattgaaaatggaacaacagtcagcatttccacatacaacgtaatactaggaggtctttgtagaaataattgtgcagacgaagcgattgccctgttccagaaattaggttcaatgaatgtgaagttcagtattgcaatagtcaataccatgatcgatgcaatgtacagggttgggagaagagaagaagctaaggaactttttgctggaatatcagctcgtgggttggtgcctaatgtatctacttatggagtaatgattatgaatcttctaaaagatggagcagtggaagatgctaacaatgtattttcatcaatggacaagagtggtatagtccccagctcccgtctcatgaatgacatcatcagattgttgttggaaaaaggtgagatcgccaaggccggatattatttgtctaaagttgatgggaagagcatatcacttgaagcttcaactacttcatcgatgttttctctcttctcaaggaaagggaaatatatgaaggacatgaatttgctccctgcaaagtatcaatttttcgat

SEQ ID NO: 2122 - DNA, 1701 bp, Triticum aestivum; identical to SEQ ID NO: 2121

SEQ ID NO: 2123 - DNA, 1701 bp, Triticum aestivum
atgatccatcaaggggttgagcctgatgtggtgacgtacaactcggtcgttgatgcattgtgcaaggccagagcaatggacaaggcagaagtagtccttcagcagatggtcaataaaggtgttcaacctaatatagtgacatatacttgcatgatcaatggatattccacatctgggcggttgaaagaggctgctaaaatgttcagagaaatgaaaagccgaggtcttataccagatattgttacttgcaactcattaatgacttccctttgcaagcatggaagaagcaaagaagctgcagaagttttttattcgatgacagcaaagggccacaaaccggatattgtctcataccgtattttgcttcatgggtatgctactgaaggatgctttcctgatatgattgatgtctttaattcaatggaaaacaatggtattgcagccgactgccatgttttcaacatattaattgatgcatatactaaacgtggaatgatagatgaagctatgctgatatcaagtaaaatgcaggaacgcagagtgaatcccgatatagtcacctattccagcataatagctggactttccagattgggtaggctgactgaggccatggaaaaattcaatcagatgattgccttgggagtacaaccgaacaaagttgtttatcacgcgctgattcagggtttttgcatagatggtgatttggctaaagctaagcagttggtttctgaaatgatgaacaaaggtattcctcgtcctaacatttcgttctttagttcagtaataaagagtctctgccaagaaggaagggttatggatgcccatgatatctttgacttggttatagacatgggtgagaggcctgacgccattttatttaattcactgattgacggatactgcttagtcaggaagatggataaagcattaaaagtacttgatgtcatggaatcagttggtgttgagcctgatgttattacatacaatacacttgttaatggctattgtagaaatggaaggatcgatgatggtttgactctgttcagagagatgccgcgtaagagaattaaacctgacactatttcatattgcgtcataatggatgggttgtttcgttctgggagaactgtttctgcaagggaaatgttccatgagatgattgaaaatggaacaacagtcagcatttccacatacaacgtaatactaggaggtctttgtagaaataattgtgcagacaaagcgattgccctgttccagaaattaggttcaatgaatgtgaagttcagtattgcaatagtcaataccatgatcgatgcaatgtacagggttgggagaagagaagaagctaaggaactttttgctggaatatcagctcgtgggttggtgcctaatgtatctacttatggagtaatgattatgaatcttctaaaagatggagcagtggaagatgctaacaatgtattttcatcaatggacaagagtggtatagtccccagctcccgtctcatgaatgacatcatcagattgttgttggaaaaaggtgagatcgccaaggccggatattatttgtctaaagttgatgggaagagcatatcacttgaagcttcaactacttcatcgatgttttctctcttctcaaggaaagggaaatatatgaaggacatgaatttgctccctgcaaagtatcaatttttcgat

SEQ ID NO: 2124 - DNA, 1701 bp, Triticum aestivum; identical to SEQ ID NO: 2121

SEQ ID NO: 2125 - DNA, 1155 bp, Triticum aestivum
atgatgcagcaaggggttgtgcctgatgtggtgacgtataactcgattattgatgcgctgtgcaaggccagagctatgggcaaggcagagttgttcctagggcagatggttgataacagtgttcgaccagataacgtgacgtatactgcagtgatccatggatattccactttgggccagtggaaaaaggcgactaaaatgtttagagaaatgacaaggcgcggtcttgaaccaaatactgtcacttggaactcattcatggcctccctctgcaagcatggaagaagcaaagaagctgcagaaatttttcattccatggctgcgaagggccacaagcctgatgtcgtctcgtattgtgttctgctccaagggtatgctacagaagggtgctttgcagatatggttgatctctataattcaatggcaagaaatggtattgtacccaatcgccaggttttcaacatattaattgatgcatatgctaagcgtggaatgacggatgaagctacgcttatatttactgaaatgcggggacaaggactgagtccagatgtatgcacctattcaactcttatatctgcacttagcagaacgggtaggctggcggatgccatggatagattcagtcagatgatttctattggcatacaaccagacgcagttgtttatcaagctctaattcagggttattgtacagttggtgatttggtgaaagcaaagggattggtttctgaaatgatgaacagaggtattccccctaccgacattgtgttctttaattcaataatgagtagtctatgcaaagaaggaagggttacaaatgcacacagtatccttgacttcgttatacactttggtgagaggcctagcatcattacatttaatttgctgattgacgggtattgcttagttggcaagatgaagaaagctttcagagtacttgataccatggcatcagttggcattgggcctgatgatatttcatatagtgcaatcattaatggctgttttaaaaatggaaggatcgatgatggattgaccatattccgagaaatgctgaagaaagttacacctacaactgttacatataacatcatactgggcgggttattttgtgctgggcaaacagttgctgcacagaaaatgttcatgaga

SEQ ID NO: 2126 - DNA, 1155 bp, Triticum aestivum; identical to SEQ ID NO: 2125

SEQ ID NO: 2127 - DNA, 1707 bp, Triticum aestivum
atgatgcagcaaggggttgtgcctgatgtggtgacgtataactcgattattgatgcgctgtgcaaggccagagctatgggcaaggcagagttgttcctagggcagatggttgataacagtgttcgaccagataacgtgacgtatactgcagtgatccatggatattccactttgggccagtggaaaaaggcgactaaaatgtttagagaaatgacaagccgcggtcttgaaccaaatactgtcacttggaactcattcatggactccctctgcaagcatggaagaagcaaagaagctgcagaaatttttcattccatggctgcgaagggccacaagcctgatgtcgtctcgtatcgtgttctgctccaagggtatgctacagaagggtgctttgcagatatggttgatctctataattcaatggcaagaaatggtattgtacccaatcgccaggttttcaacatattaattgatgcatatgctaagcgtggaatgacggatgaagctacgcttatatttactgaaatgcggggacaaggactgagtccagatgtatgcacctattcaactcttatatctgcacttagcagaacgggtaggctggcggatgccatggatagattcagtcagatgatttctattggcatacaaccagacgcagttgtttatcaagctctaattcagggttattgtacagttggtgatttggtgaaagcaaagggattggtttctgaaatgatgaacagaggtattccccctaccgacattgtgttctttaattcaataatgagtagtctatgcaaagaaggaagggttacaaatgcacacagtatccttgacttcgttatacactttggtgagaggcctagcatcattacatttaattttctgattgacgggtattgcttagttggcaagatgaagaaagctttcggagtacttgataccatggcatcagttggcattgggcttgatgatatttcatatagtgcaatcattaatggctgttttaaaaatggaaggatcgatgatggattgaccatattccgagaaatgctgaagaaagttacacctacaactgttacatataacatcatactgggcgggttattttgtgctgggcaaacagttgctgcacagaaaatgttccatgagatgatcgaaagtggaataacagtgagcagttccacatacaggacaatccttggaggactttgcaggaatagttgtgaggacgaagcgatcaccctgttccagaaattaggagcaatgaatgtgaagttggatattgcaatactcaataccatgatcaatgcaatgttcaaggttcagagaagagaagaagctatcgatttgtttgctgcagtatcatccagtggattggtacctaatgcttctacctacggtgtaatgataaaaaatcttctaagagaaggatcagtggaaaaagctgaaaatatgttctcattaatggagaagagcggttgtgctccggactctcgtcttataaatgatatcatcagaatattattacagaaaggtgagattgtcaaggctggaaattatatgtctaaagttgatggcaggaggatctcacttgaagctagaactacttcattgctgatacgtctcttttcaagtgaagggaaatatcggggacaaataaatttgctccctgtaaagtaccaaaattttgatggatttagt

SEQ ID NO: 2128 - DNA, 1707 bp, Triticum aestivum; identical to SEQ ID NO: 2127

SEQ ID NO: 2129 - DNA, 1707 bp, Triticum aestivum; identical to SEQ ID NO: 2127

SEQ ID NO: 2130 - DNA, 1707 bp, Triticum aestivum
atgatgcagcaaggggttgtgcctgatgtggtgacgtataactcgattattgatgcgctgtgcaaggtcagagctatgggcaaggcagagttgttcctagggcagatggttgataacagtgttcgaccagataacgtgacgtatactgcagtgatccatggatattccactttgggccagtggaaaaaggcgactaaaatgtttagagaaatgacaagccgcggtcttgaaccaaatactgtcacttggaactcattcatggactccctctgcaagcatggaagaagcaaagaagctgcagaaatttttcattccatggctgcgaagggccacaagcctgatgtcgtctcgtatcgtgttctgctccaagggtatgctacagaagggtgctttgcagatatggttgatctctataattcaatggcaagaaatggtattgtacccaatcgccaggttttcaacatattaattgatgcatatgctaagcgtggaatgacggatgaagctacgcttatatttactgaaatgcggggacaaggactgagtccagatgtatgcacctattcaactcttatatctgcacttagcagaacgggtaggctggcggatgccatggatagattcagtcagatgatttctattggcatacaaccagacgcagttgtttatcaagctctaattcagggttattgtacagttggtgatttggtgaaagcaaagggattggtttctgaaatgatgaacagaggtattccccctaccgacattgtgttctttaattcaataatgagtagtctatgcaaagaaggaagggttacaaatgcacacagtatccttgacttcgttatacactttggtgagaggcctagcatcattacatttaattttctgattgacgggtattgcttagttggcaagatgaagaaagctttcggagtacttgataccatggcatcagttggcattgggcttgatgatatttcatatagtgcaatcattaatggctgttttaaaaatggaaggatcgatgatggattgaccatattccgagaaatgctgaagaaagttacacctacaactgttacatataacatcatactgggcgggttattttgtgctgggcaaacagttgctgcacagaaaatgttccatgagatgatcgaaagtggaataacagtgagcagttccacatacaggacaatccttggaggactttgcaggaatagttgtgaggacgaagcgatcaccctgttccagaaattaggagcaatgaatgtgaagttggatattgcaatactcaataccatgatcaatgcaatgttcaaggttcagagaagagaagaagctatcgatttgtttgctgcagtatcatccagtggattggtacctaatgcttctacctacggtgtaatgataaaaaatcttctaagagaaggatcagtggaaaaagctgaaaatatgttctcattaatggagaagagcggttgtgctccggactctcgtcttataaatgatatcatcagaatattattacagaaaggtgagattgtcaaggctggaaattatatgtctaaagttgatggcaggaggatctcacttgaagctagaactacttcattgctgatacgtctcttttcaagtgaagggaaatatcggggacaaataaatttgctccctgtaaagtaccaaaattttgatggatttagt

SEQ ID NO: 2131 - DNA, 1824 bp, Triticum aestivum
atgatggcgaaagaaggaggtggttgcttccccaacgtggtggcttataacacggtcatccatggcttccttaaggagggcaaaacaggcaaggcatgcaatctcttccatgaaatgatgcagctagggcttgtgcccgatgtggtgacatacaactcgatcgttgatgcgttgtgcaaggccagagcaatggacaaggcagaagtagtccttcatcagatgatcggtaaaggtgctcaacctgatacagtgacatataattgcatgatccatggatattccacatctgggcggttgaaagaggctgttaaaatgttcagagaaatgaaaagccggggtcttgcaccaaatattgttacttgcggctcgttaatgacttccctttgcaagcatggaagaagcaaagaagctagagaaatatttgattccatgactgccaaaggccacagagctaatgtcgtctcatactctattttgcttcatgggtatgccaatgaaggatgctttgctgatatgattgatctctttaattcaatgaaaagcaacggtattgcagctgactgccgtgtttttaccatattaattgatgcctatgctaaacgtggaatgatggatgatgcaatgcacatatttacggaaatgtgggaaaaaggagtgagtcccgatgtggttacctattccactgtaatagctgcactttccaggatgggtagattgaccgatgctatggacaaatttaatcagatgatttccatgggggttcaaccgaacacagttgtttatcacaccctaattcagggctcttgtatgcatggtgatttgattaaagccaaggagctggtttctgaaatgatgaacaaaggtattcctcgtcctagcattgcgttcttcggttcaataataaacaggttatgcaaagatggaagggttatggatgcacatgatatctttgacttggttatagacataggcgagaggcctagtgtcattacatttaattcactggttgacggatattgcttagtcggcaagatggataaagcatttggaatgcttaatgccatggaatcagttggtgttgagcctgatattgttacttacagtacacttcttgatggctattttaaaaatggaaggatcaatgatggtttgactctgtttagagaaatgccgcttaagagaattaaacctgacactgttacatatggcatcatgttggatgggtgttttcgtgctgggagaactgttgctgcaaggacaatgttccatgagatgatcgaaagtggaataacagtggacatccccacatataatatagttcttaggggactttgtagaaataactgcacagatgaagcaatcgccctgttccagaaattaggtgcaatgagtatgaagttcaatattgcaatactcaataccatgatcaatgcaatctacaaggttcggagaagagaagaagctaacaatttgtttgctgcaatatcagccagtgggttggtgcccaatcaatctacttatgctgtaatgataataaatcttctaaaagatggagcagtggaacatgctagcaatatgttttcatcaatggagaaaagtggtattgtccccagctcccgtcttataaatggtatcatcagattgttgttggagaatggtgagattgccaaggctggaatttatttgtctaaagttgatgggaatagcatctcacttgaagcttcaactacttcattgatgttgtctctgttttcaaggaaagggaaatatcaggaggacatgaagttgctccctgcaaagtatcaattttttggtgaatttggc

SEQ ID NO: 2132 - DNA, 1044 bp, Triticum aestivum
atgatggcgaaagaaggaggtggttgcttccccaacgtggtggcttataacacggtcatccatggcttccttaaggagggcaaaacaggcaaggcatgcaatctcttccatgaaatgatgcagctagggcttgtgcccgatgtggtgacatacaactcgatcgttgatgcgttgtgcaaggccagagcaatggacaaggcagaagtagtccttcatcagatgatcggtaaaggtgctcaacctgatacagtgacatataattgcatgatccatggatattccacatctgggcggttgaaagaggctgttaaaatgttcagagaaatgaaaagccggggtcttgcaccaaatattgttacttgcggctcgttaatgacttccctttgcaagcatggaagaagcaaagaagctagagaaatatttgattccatgactgccaaaggccacagagctaatgtcgtctcatactctattttgcttcatgggtatgccaatgaaggatgctttgctgatatgattgatctctttaattcaatgaaaagcaacggtattgcagctgactgccgtgtttttaccatattaattgatgcctatgctaaacgtggaatgatggatgatgcaatgcacatatttacggaaatgtgggaaaaaggagtgagtcccgatgtggttacctattccactgtaatagctgcactttccaggatgggtagattgaccgatgctatggacaaatttaatcagatgatttccatgggggttcaaccgaacacagttgtttatcacaccctaattcagggctcttgtatgcatggtgatttgattaaagccaaggagctggtttctgaaatgatgaacaaaggtattcctcgtcctagcattgcgttcttcggttcaataataaacaggttatgcaaagatggaagggttatggatgcacatgatatctttgacttggttatagacataggcgagaggcctagtgtcattacatttaaatgtaatgacactaggcctctttgcacatactgtttattactgaat

SEQ ID NO: 2133 - DNA, 1824 bp, Triticum aestivum; identical to SEQ ID NO: 2131

SEQ ID NO: 2134 - DNA, 1824 bp, Triticum aestivum; identical to SEQ ID NO: 2131

SEQ ID NO: 2135 - DNA, 795 bp, Triticum aestivum
atgtcatggaatcagttggtgttgagcctgatgttattacatataatacacttgttaatggctattgtaaaagtggaaggatcgatgatggtctcgttctattcagagaaatgccgagtaagagagttaaacctgactgttacatatggcatcatactggcagggttgtttcgtgcttggagaactattgctgcaaggacaatgttccatgagatgatcgaaagtggaataacagtggacatcgtcacatacaatataattcttacaggactctgtagaaataattgcatagatgaagcgatcgccctgttccagaaattaggtgtaatgagtgtgaagttcaatattgcaataataaataccatgatcgatgcaatgtacaaggttcggagaagagaagaagccagtgatttatttgctgcaatatcagccagtggattggtgcccaatgaatctacttatgcagtaatgataataaatcttctaaaagatggagcagtggaagaagcagacaatatgttttcatcaatggagaaaagtggtatagtccccagctcccgtctgttaaatcgtatcatcagaatgttgttggaaaaaggtgagactgccaaggccggaaattatttgtctaaagttgatgggaagggcatctcacttgaagcttcaacgacttcattaatgttgtctctcttttcaagagaagggaaatatcgggaggacgtgaaattgcttcctgcaaagtaccaattttttgatggatttgttgattttgcacaagactctgctcaggaagct

SEQ ID NO: 2136 - DNA, 1818 bp, Triticum aestivum
atgtgggcatataacacggtaatccatggcttctttaaggaaggcgaaacaggcaaggcgtgcaatctattccatgaaatggtacggcaagggattgtgcctgatgtggtgacatataactcgattattgacgcgttgtgcaaggccagggcaatggacaaggcagagttagtccttcagcagatggttgctgatggtgctcaacccaatgaagtgacatataattccatgatcaatggatatgcctcatctgggcgcttaaaagggactactaaaatgttcagagaaatgaaaaggcggggtcttataccagataattttacttgcaactcgttcctggcctccctgtgcaagcatggaagaagcaaagaagctgcagaattttttgattccatgacagccaagggccacaaacctgatatcgtctcgtactgtactttgcttcatgggtatgccagtgaaggatgctttgctgatatgattgatctttttaattcaatggaaagcaatgttattgcggccgactgccgtgttttcaccattttaattgttgcctatgctaaacgtggaatgatggatgaagctatgctggtatcaagtaaaatgcaggaacgcggagtgaatccgaatatattcacctattccagcataatagctggcctttccagaatgggtaggctgaccgaggccatggaaaaattcaatcagatgattgctttgggagtacaaccggacaaagttgtttatctgtctctgattcagggtttttgcttagatggtgatttggctaaagttaagcagttggtttctgaaatgatgaacagaggtattcctcattctggcattccgttcttcggttcagtaataaagaatctgtgccaagaaggaagggttatggatgcacatgaaatctttgacttggttatagacatgggtgagaggcctgatgacattttatttaattcactgattgatggatactgcttagtcgggaagatggataaagcattaaaagtacttgatgtcatggaatcagttggtgttgagcctgatgttattacatataatacacttgttaatggctattgtaaaagtggaaggatcgatgatggtctcgttctattcagagaaatgccgagtaagagagttaaacctgacactgttacatatggcatcatactggcagggttgtttcgtgcttggagaactattgctgcaaggacaatgttccatgagatgatcgaaagtggaataacagtggacatcgtcacatacaatataattcttacaggactctgtagaaataattgcatagatgaagcgatcgccctgttccagaaattaggtgtaatgagtgtgaagttcaatattgcaataataaataccatgatcgatgcaatgtacaaggttcggagaagagaagaagccggtgatttatttgctgcaatatcagccagtggattggtgcccaatgaatctacttatgcagtaatgataataaatcttctaaaagatggagcagtggaagaagcagacaatatgttttcatcaatggagaaaagtggtatagtccccagctcccgtctgttaaatcgtatcatcagaatgttgttggaaaaaggtgagactgccaaggccggaaattatttgtctaaagttgatgggaagggcatctcacttgaagcttcaacgacttcattaatgttgtctctcttttcaagagaagggaaatatcgggaggacgtgaaattgcttcctgcaaagtaccaatttttttatggatttgttgattttgcacaagactctgctcaggaagct

SEQ ID NO: 2137 - DNA, 1230 bp, Triticum aestivum
atgtgggcatataacacggtaatccatggcttctttaaggaaggagaaacaggcaaggcgtgcaatctattccatgaaatggtacggcaagggattgtgcctgatgtggtgacatataactcgattattgacgcgttgtgcaaggccagggcaatggacaaggcagagttagtccttcagcagatggttgctgatggtgctcaacccaatgaagtgacatataattccatgatcaatggatatgcctcatctgggcgcttaaaagggactactaaaatgttcagagaaatgaaaaggcggggtcttataccagataattttacttgcaactcgttcctggcctccctgtgcaagcatggaagaagcaaagaagctgcagaattttttgattccatgacagccaagggccacaaacctgatatcgtctcgtactgtactttgcttcatgggtatgccagtgaaggatgctttgctgatatgattgatctttttaattcaatggaaagcaatggtattgcggccgactgccgtgttttcaccattttaattgttgcctatgctaaacgtggaatgatggatgaagctatgctggtatcaagtaaaatgcaggaacgcggagtgaatccgaatatattcacctattccagcataatagctggcctttccagaatgggtaggctgaccgaggccatggaaaaattcaatcagatgattgctttgggagtacaaccggacaaagttgtttatctgtctctgattcagggtttttgcttagatggtgatttggctaaagttaagcagttggtttctgaaatgatgaacagaggtattcctcattctgacattccgttcttcggttcagtaataaagaatctgtgccaagaaggaagggttatggatgcacatgaaatctttgacttggttatagacatgggtgagaggcctgatgacattttatttaattcactgattgatggatactgcttagtcgggaagatggataaagcattaaaagtacttgatgtcatggaatcagttggtgttgagcctgatgttattacatataatacacttgttaatggctattgtaaaagtggaaggatcgatgatggtctcgttctattcagagaaatgccgagtaagagagttaaacctgactgttacatatggcatcatactggcagggttgtttcgtgcttggagaactattgctgcaaggacaatgttcca

SEQ ID NO: 2138 - DNA, 1818 bp, Triticum aestivum
atgtgggcatataacacggtaatccatggcttctttaaggaaggcgaaacaggcaaggcgtgcaatctattccatgaaatggtacggcaagggattgtgcctgatgtggtgacatataactcgattattgacgcgttgtgcaaggccagggcaatggacaaggcagagttagtccttcagcagatggttgctgatggtgctcaacccaatgaagtgacatataattccatgatcaatggatatgcctcatctgggcgcttaaaagggactactaaaatgttcagagaaatgaaaaggcggggtcttataccagataattttacttgcaactcgttcctggcctccctgtgcaagcatggaagaagcaaagaagctgcagaattttttgattccatgacagccaagggccacaaacctgatatcgtctcgtactgtactttgcttcatgggtatgccagtgaaggatgctttgctgatatgattgatctttttaattcaatggaaagcaatggtattgcggccgactgccgtgttttcaccattttaattgttgcctatgctaaacgtggaatgatggatgaagctatgctggtatcaagtaaaatgcaggaacgcggagtgaatccgaatatattcacctattccagcataatagctggcctttccagaatgggtaggctgaccgaggccatggaaaaattcaatcagatgattgctttgggagtacaaccggacaaagttgtttatctgtctctgattcagggtttttgcttagatggtgatttggctaaagttaagcagttggtttctgaaatgatgaacagaggtattcctcattctgacattccgttcttcggttcagtaataaagaatctgtgccaagaaggaagggttatggatgcacatgaaatctttgacttggttatagacatgggtgagaggcctgatgacattttatttaattcactgattgatggatactgcttagtcgggaagatggataaagcattaaaagtacttgatgtcatggaatcagttggtgttgagcctgatgttattacatataatacacttgttaatggctattgtaaaagtggaaggatcgatgatggtctcgttctattcagagaaatgccgagtaagagagttaaacctgacactgttacatatggcatcatactggcagggttgtttcgtgcttggagaactattgctgcaaggacaatgttccatgagatgatcgaaagtggaataacagtggacatcgtcacatacaatataattcttacaggactctgtagaaataattgcatagatgaagcgatcgccctgttccagaaattaggtgtaatgagtgggaagttcaatattgcaataataaataccatgatcgatgcaatgtacaaggttcggagaagagaagaagccagtgatttatttgctgcaatatcagccagtggattggtgcccaatgaatctacttatgcagtaatgataataaatcttctaaaagatggagcagtggaagaagcagacaatatgttttcatcaatggagaaaagtggtatagtccccagctcccgtctgttaaatcgtatcatcagaatgttgttggaaaaaggtgagactgccaaggccggaaattatttgtctaaagttgatgggaagggcatctcacttgaagcttcaacgacttcattaatgttgtctctcttttcaagagaagggaaatatcgggaggacgtgaaattgcttcctgcaaagtaccaattttttgatggatttgttgattttgcacaagactctgctcaggaagct

SEQ ID NO: 2139 - DNA, 1818 bp, Triticum aestivum; identical to SEQ ID NO: 2136

SEQ ID NO: 2140 - DNA, 1818 bp, Triticum aestivum; identical to SEQ ID NO: 2136

SEQ ID NO: 2141 - DNA, 1818 bp, Triticum aestivum
atgtgggcatataacacggtaatccatggcttctttaaggaaggcgaaacaggcaaggcgtgcaatctattccatgaaatggtacggcaagggattgtgcctgatgtggtgacatataactcgattattgacgcgttgtgcaaggccagggcaatggacaaggcagagttagtccttcagcagatggttgctgatggtgctcaacccaatgaagtgacatataattccatgatcaatggatatgcctcatctgggcgcttaaaagggactactaaaatgttcagagaaatgaaaaggcggggtcttataccagataattttacttgcaactcgttcctggcctccctgtgcaagcatggaagaagcaaagaagctgcagaattttttgattccatgacagccaagggccacaaacctgatatcgtctcgtactgtactttgcttcatgggtatgccagtgaaggatgctttgctgatatgattgatctttttaattcaatggaaagcaatggtattgcggccgactgccgtgttttcaccattttaattgttgcctatgctaaacgtggaatgatggatgaagctatgctggtatcaagtaaaatgcaggaacgcggagtgaatccgaatatattcacctattccagcataatagctggcctttccagaatgggtaggctgaccgaggccatggaaaaattcaatcagatgattgctttgggagtacaaccggacaaagttgtttatctgtctctggttcagggtttttgcttagatggtgatttggctaaagttaagcagttggtttctgaaatgatgaacagaggtattcctcattctgacattccgttcttcggttcagtaataaagaatctgtgccaagaaggaagggttatggatgcacatgaaatctttgacttggttatagacatgggtgagaggcctgatgacattttatttaattcactgattgatggatactgcttagtcgggaagatggataaagcattaaaagtacttgatgtcatggaatcagttggtgttgagcctgatgttattacatataatacacttgttaatggctattgtaaaagtggaaggatcgatgatggtctcgttctattcagagaaatgccgagtaagagagttaaacctgacactgttacatatggcatcatactggcagggttgtttcgtgcttggagaactattgctgcaaggacaatgttccatgagatgatcgaaagtggaataacagtggacatcgtcacatacaatataattcttacaggactctgtagaaataattgcatagatgaagcgatcgccctgttccagaaattaggtgtaatgagtgggaagttcaatattgcaataataaataccatgatcgatgcaatgtacaaggttcggagaagagaagaagccagtgatttatttgctgcaatatcagccagtggattggtgcccaatgaatctacttatgcagtaatgataataaatcttctaaaagatggagcagtggaagaagcagacaatatgttttcatcaatggagaaaagtggtatagtccccaggtcccgtctgttaaatcgtatcatcagaatgttgttggaaaaaggtgagactgccaaggccggaaattatttgtctaaagttgatgggaagggcatctcacttgaagcttcaacgacttcattaatgttgtctctcttttcaagagaagggaaatatcgggaggacgtgaaattgcttcctgcaaagtaccaattttttgatggatttgttgattttgcacaagactctgctcaggaagct

SEQ ID NO: 2142 - DNA, 1605 bp, Triticum aestivum
atgccccgtctccgcctccgtcgcttctccaccgcgccgatgttccacctcctccgccgcagctcctcctccaccaccacctcgccgccctcgcgttcctggtctccccacgccgcctttgccgccgccacggagcgcatccgcgccgggacgctcagccgggaagacgcgcaccacctgttcgacgaattgctacggcaggccacccccgtccccagccgctccctaaacggcttacttgccgctctcgcccgtgtgcccgcccccgccgcctgcatcagagatggtcccgctctcgcccttggcctcttcaaccgcgtctgccgggatgaagccggcgcgcgggtggcaccacccacagtcttcacttacggtatcctcatgcactgctgctgctgcgcacatcgcccggacctagggcttgccttattcggccgcttcctcaggacgggcctgaagacaaatgagatcattgccaccaccttcctcaagtgcctctgctacgcaaaacggacggatgaggctctgaacgtgctgcttcataggatgtccgagctcggctgtgtgcctgatgccatctcatacaacattgttctgaagagcttatgtgaagatagcatgagtcagcgggcgctcgacctcctccagatgatggcgaaagaaggaggtggctgctcccccaacgtggtggcgtatagcacagtcatccatggcttttttaaggaaggtgaaacaggcaaggcatgcaatctgttccatgaaatgatgcagcaagatgttgagcccaatgtgtggacatatagttcaatcattgatgcattgtgcaatgccagagcaatggacaaggcagagctagtgcttcagcagatggttaacaaaggtgttcaacccaataatgtgacatataattgcatgatccatggatattccacatctgggaggtggaaagaggctgctaaattgtttagagaaatgaaaagccggggccttataccagatacttctacttgcaacgccttaatgacttaccattgtaagcatggaagaagcaaagaagctgcagaattttttgatgccatgactgccaaaggccacagagatgtcatctcctactgtattttgcttcatgggtatgccaatgaaggatgctttgctgatatgattgatctctttaattcaatggaaagcaatggttttgtagccgactgccatgttttcaccatattaattgatgcatatgctaaacgtggaatgatggatgaagctatgctcatatttactgaaatgcgggaaaaaggagtgagtcccaatgtagtcacctattccactgtaatagccgcactttgcagattgggtaggctgtccgatgctatggacaggttcaatgagatgactgatatgggtgtacagccgaacacagctgtttatcactccctaattcagggtttttgtatgcatggtgatttggttaaagttaaggaatttgtttctgaaatgatgaacaaaggtattcctcgtcctgacattgcgttcttcacttcagtaattaactctttatgcaaagaaggaagggttatgaatgcacaagtatctttgacttggtta

SEQ ID NO: 2143 - DNA, 1605 bp, Triticum aestivum; identical to SEQ ID NO: 2142

SEQ ID NO: 2144 - DNA, 1605 bp, Triticum aestivum; identical to SEQ ID NO: 2142

SEQ ID NO: 2145 - DNA, 1557 bp, Triticum aestivum
atggcgactgcgtcgtttgaggagagaaccacctcgccgccctcgcgttcctggtctccccacgccgccattgccgccgccacggagcgcatccgcgccgggacgctcagccgggaagacgcgcaccacctgttcgacgaattgctacggcaggccacccccgtccccagccgctccctaaacggcttacttgccgctctcgcccgtgtgcccgcccccgccgcctgcatcagagatggtcccgctctcgcccttggcctcttcaaccgcgtctgccgggatgaagccggcgcgcgggtggcaccacccacagtcttcacttacggtatcctcatgcactgctgctgctgcgcacatcgcccggacctagggcttgccttattcggccgcttcctcaggacgggcctgaagacaaatgagatcattgccaccaccttcctcaagtgcctctgctacgcaaaacggacggatgaggctctgaacgtgctgcttcataggatgtccgagctcggctgtgtgcctgatgccatctcatacaacattgttctgaagagcttatgtgaagatagcatgagtcagcgggcgctcgacctcctccagatgatggcgaaagaaggaggtggctgctcccccaacgtggtggcgtatagcacagtcatccatggcttttttaaggaaggtgaaacaggcaaggcatgcaatctgttccatgaaatgatgcagcaagatgttgagcccaatgtgtggacatatagttcaatcattgatgcattgtgcaatgccagagcaatggacaaggcagagctagtgcttcagcagatggttaacaaaggtgttcaacccaataatgtgacatataattgcatgatccatggatattccacatctgggaggtggaaagaggctgctaaattgtttagagaaatgaaaagccggggccttataccagatacttctacttgcaacgccttaatgacttaccattgtaagcatggaagaagcaaagaagctgcagaattttttgatgccatgactgccaaaggccacagagatgtcatctcctactgtattttgcttcatgggtatgccaatgaaggatgctttgctgatatgattgatctctttaattcaatggaaagcaatggttttgtagccgactgccatgttttcaccatattaattgatgcatatgctaaacgtggaatgatggatgaagctatgctcatatttactgaaatgcgggaaaaaggagtgagtcccaatgtagtcacctattccactgtaatagccgcactttgcagattgggtaggctgtccgatgctatggacaggttcaatgagatgactgatatgggtgtacagccgaacacagctgtttatcactccctaattcagggtttttgtatgcatggtgatttggttaaagttaaggaatttgtttctgaaatgatgaacaaaggtattcctcgtcctgacattgcgttcttcacttcagtaattaactctttatgcaaagaaggaagggttatgaatgcacaagtatctttgacttggtta

SEQ ID NO: 2146 - DNA, 1788 bp, Triticum aestivum
atgtggtggcatatagcagtcatccatggctttttcaaggaaggcgaaacaagcaaggcatgcaatctgttccatgaaatgatgcagcaaggtgttgagcccagtgtgtggacatatagttcaatcattgatgcattgtgcaaggccagagcaatggacaaggcagagctagtgcttcagcagatggttaacaaaggtgttcaacccaataatgtcacatataattgcatgatccatggatattccacatctgggaggtggaaagaggctgctaaattgtttagagaaatgaaaagccagggccttatacctgatacttttacttgcaacgccttaatgacttacctttgtaagcatggaagaagcaaagaaggtgcagaaatttctgatgccatgactgccaaaggccacaaaccggatatcgtctcatacagtattttgcttcatgggtatgccaatgaaggatgctttgctgatatgattgatctctttaattcaatggaaaggaatggcattgcagccgactgccatgttttcagcatattaattaatggatatgctaaatgtggaatgacggatgaagctatgctgatatttacagaaatgtgggaaaaaggagtgagtcccgatgtagtcacctattccactgtaatagctgcactttccagaatggggaggttgaccgacgctatggaaaaatttaatcagatgattgccatgggaattcaaccgaacacagccatttatcactccctaattcagggtttttgcatagacggtgatttggttaaagccaagcagctggtttctgaaatgatgaacagaggtattcctcggcctaacattgtgttcttcaatttagtaataaacagtctgtgcaaagaaggaagggttatggatgcacatgatgtcttagacttggttataggcataggtgagaggcctaatgtcattacatttaattcactgattgacggatattgcttagtcgggaagatggataaagcattcaaaatacttgatgtcatgaaatcagttggtgttgagtctgatgttgttacttatagtgcacttcttgatggctattctaaaaatagaaggattgatgatgctttgactttgtttagagaaatgccgcataagagaattaaatctgacactgttacatatggcatcgtgttggatgggttgtttcatgctgggagaactgttgctgcaatgaaaatgttccatgagatgatcaaaagtggaacaacagtgagtatttacacatacagtataatacttggaggtctttgtagaaataattgtgtagacgatgcgattgcactgttccagaaattacgatcaatgaatgtaaagttcaatattgaaatactcaataccatgattaatgcaatgtacaaggttcaaagaaaagaagaagctaaggatttgtttactacaatatcagccaatgggttggtgcccagtgaatctacttatgcagtaatgataagaaatcttctgaaagacggagcagtggaagatgctgacaatatgttttcatcaatggacaacagtggtatcgttcccagttcccatcttataaatgatatcatcagaatgttgttggaaaaaggtgagatagccaaggctggaaattatttgtctaaagttgatgggaagagtatctcacttgaagcttcaactacctcattgatgttgtctctcttttcaaggaaagggaaacatcaggaggatattaagttgctccctgcaaagtatcaaatttttgatggatttagt

SEQ ID NO: 2147 - DNA, 1758 bp, Triticum aestivum
atgtccaacctccgcctcctccgccgcagctcctcctccatgtccaccaccacgtcgccgccctcgcgctcctggtccccccattcggcctttgccgcggccacagagcgcgtgcgcgccaggacgctcagccaagacgatgcacaccacctgttcgacgaattgctgcggcaggccaccccggtccacgagcgctccctcaacggcttcctcgccgccctcgcgcgtgctacgtcctctgccgcttgcatcagagatggtcccgccctcgccatcgccctcttcaatcgcgtgtgccgagaacaagccggcccgcgggtggcgcctctcacagtccacacctacggcatcctcatggaatgttgttgtcgggcgggtcacccggaactagggcttgccatattcagccgtcttctcaggacggggctcaagacaaacgagatagtcggcagcaccttcctcaagtgcctctcctacgcaaaacggacggatgaggctctgaatgtgttgcttcataggatgcccgagctcggctgtgtgcctaatgccttctcatactccattgttctgaagagcttatgcaacaatagcatgagtcagcgggcgctcgacctgctccagaggatggcgaaagaaggaggtggctgcttccttaatgtggtgacacatagcacggtcatccatggcttctttaaggaaggtgaaataggcaaggcatgcactctgttccatgaaatgatgcagcaaggtgttgtgcccaatgtgtggacgtataactcgattattgatgcattgtgcaaggccagagcaatggacaaggcagagctagtccttcgtcagatggttgctaaaggtgctcaacccgatacagtgacatataattgcttgatcaatggatatgccacatctgggcggttgaaagaggctgctaaaatgttcagagaaatgaaaagccggggtcttacaccaaatattgttacctgcggctcgttaacgacttccctttgcaagcatggaagaagcaaagaagctagagaaatatttgattccatgacttccaaaggccacagagctaatgtcgtctcatactctattttgcttcatgggtatgccaatgaaggatgctttgctgatatgatttatctctttaattcaatgaaaagcaacggtattgcagccgactgccgtgttttcaacatattaattaatggatatgctaaacgtggaatgatggatgaagctgtgctgatatttactgaaatgcgggaaaaaggagtgagtcctgatgtagtcacctataccactgtaatagccgcactttccagaatgggtaggttgaccgatgctgtggacgaattcgatgagatgattgcaatgggagtacagccaagcatacctgtttatcagtccctgattcagggtttttgcatcgatggtgatttggttaaagccaaggagctggtttctgaaatgatgaacaaaggtattccttgtcctaacattgtgttcttcaattcagtaataaacagtctgtgcaaagaagaaagggttatggatgcacatgatatctttgacttggttatagacataggtgagaggcctgataccattacatttagttcactgattgacggatattgcttagtcggcaagatggataaagcattcggaatgcttaatgccatggaattagttggtgttgagcctgattgtaacgccttcgatgcggctatatctcccacgtgtcgaagcacgact

SEQ ID NO: 2148 - DNA, 1752 bp, Triticum aestivum
atgagccgccgctttgtccccgtcggcagacacatcttagagcagaacatcaaggctcggtaccatgctggagacattggcaccgaggacgcactccacctgtttgacgaattgctccaggttgctgggcgctcctcgatccatgccatcaactgcctcctcaccgttgtcggccgtgattgccctgcgctcggcgtctccctcttcaaccgtgtcgcaaggtccaaggtggcaccctgcagtatcacctatgccattctggtcgactgctgctgccgcgctggccgccaggaccttggacacactgccatgggacacgtcatcaagatgggatttcttgcagatgctattatcactttcagccacctactaaaggccatctgtgcagagaacaagaccagctatgcaatggacatcgtactccaggaaatggacatctcgtccatttttgatcggattttccaggaaatgtctagaaatggtgttcaaccagatattgtaacttacactatacagatggattatctttgcaagagcggaagatgcacagaagctaggaagatttttgattctatgatcagtttgggccaaaaaccgaccgttactacctacagcattctgcttcatgggtatgctatggaaaaatcttttcatgatatgctttgtctcattgatttgatggtaggtaatggtattgtaccagatcattatgtctacaacatactcatatctgcatatgctaaagaagaaatggttggtgaggtaatgcatatatttacaaaaatgcggcagcaaggattgaaccctgatgcagtgagctacggaacagtaatagacttactttccaggattggccgaatggatgatgctatgtccctattcaatcaaatgataactgaaggattagctcctggtatcatagttttcaaccaccttattagtggtttttgtacttgtggcaaatgggagaaggttcatgaactattttctgaaatgttggattgcggcatctgtccagacacagtgttcttcaacacagttatggatcgcctttgcaaaaatggaagggttacggaagcccaggatctctttgacctgatggtacacatgggtgtgaagcctgacgtgtgtacttataacacactgatgggtggatacttgttcgttggtaagatggatgaagtgagcaagttacttgacaatatggtctcaattggcatggaaccagatgttatcacctataacatactgattgatggttactctaagaatggaaggatagatgatgcattggttgttttcagggaaatgttggacacgaagggtaagccgtctgttatcagttttaatattatgattggtgcattgcttaaatgtggtaggaaggcagaagccaaagatttgtttgacggtatctgggccaacggattagtgcctgacattgttacatatagcttaatgatacaaaaactaatagaagaaggttctctacaagagtctgatgatctattcgtttctatggagaagaatgggtgtgctgccaactcccgtatgctaaatgctatagttagaagcttacttcagaagggggaggtgcccagggctgggacttatctgtctaaaattgatgagaggagcttcatccttgaagcttccacagctagcttgttgactgcacttgcgtcaagggggaaaggccaggaatataaggagttactccccgaaaaatactctgaactgctaatcgaggcc

SEQ ID NO: 2149 - DNA, 1752 bp, Triticum aestivum; identical to SEQ ID NO: 2148

SEQ ID NO: 2150 - DNA, 1752 bp, Triticum aestivum; identical to SEQ ID NO: 2148

SEQ ID NO: 2151 - DNA, 1635 bp, Triticum aestivum
atgagccgccgctttccccctgtcggcagacgcatcttggagaggagaattgaagaacggtacagcgccagagacattggcactgacgacacactcaacctgttcgacgaattgatccaggttgctgggccttcctcggtccgcgcaatcaactgcctcctcaccgtcgtcggccgtgattgccccgcactcggcgtctccctcttcaaccgtgttgcaagagccaaggtgcctccacacaatatcacctatggcattctagtcgactgctgctgccgtgctggccgcttggaccttggacacgctgccatgggacacgtcattaagttgggatttacagcagaagctatcgtcaatttcagccacctactcaaggccatctgtgcagtgaagaagaccagctatgcaatggacatcgtactccgagtaatgcctgagtttaactgcacaccgaacattttctcctacagcattcttttcaagggtctttgcaatgaaaggagaagccaagaggctcttgagctgattaatattatggttgaggatggaggtagctgccaacctgatgtggtgacctataacactgtaattgatggcttgttgaaagagggtgaggtggaccaagcttacagcctattttctgaaatgctgcgtcagggggtatcaccgaatgttgtgacatgtaattcaatcatctctggcatgtgcaagcttcacgcgatggacaaggctgaggaggttcttcaacagatgcttgatagacgaattctgccagatgttgccacatataatagtctgatacatggatattattcattaggacagtgcgaagaggtggatcggattttcaaggagatgactacaaatggtgttcaaccagatgttgtaacttacaatatacagatggattatctttgcaagaatggaagatgcgcagaagctaggaagatttttgattccatgatcagtttgggccaaaaacctactgttactacctacaacattctgcttcatgggtatgctatggaaagatcttttcatgatatgaattgtctcattgagttgatggatgataatggtatttcaccagatcattatggctacaacatactcatatctgcttatgctaaagaaaaaatggttgatgatgtattgcatatatttacaaaaatgcggcagcaaggattgaaccctgatgttgcgaactatggagcggtaataaacttgctttctagtattggccgaatggatgatgctatgtcccaatacaatcaaatgataaatgaagggttagctcctgatatcatagttttcaactcccttattagtggtttctgttcttgtggcaaatgggagaaggttcatgaactattttctgagatgttggatcgcggcatctgtcccaacacagtgttcttcaccactattatggaccrcctttgcaaaaatggaagggttatagaagcccaagatgtgttcgacctgatggtacacatgggtgtgaagcctgacgtgcgtagtcatgtcacactgatgcatggatactttgcagatggtaagatggatgaaatgaggaagttacttgaaaatatgtgctcaattggcttgaaactgatgttgtcacctatagcatac

SEQ ID NO: 2152 - DNA, 1533 bp, Triticum aestivum
atgagccgccgctttccccctgtcggcagacgcatcttggagaggagaattgaagaacggtacagcgccagagacattggcactgacgacacactcaacctgttcgacgaattgatccaggttgctgggccttcctcggtccgcgcaatcaactgcctcctcaccgtcgtcggccgtgattgccccgcactcggcgtctccctcttcaaccgtgttgcaagagccaaggtgcctccacacaatatcacctatggcattctagtcgactgctgctgccgtgctggccgcttggaccttggacacgctgccatgggacacgtcattaagttgggatttacagcagaagctatcgtcaatttcagccacctactcaaggccatctgtgcagtgaagaagaccagctatgcaatggacatcgtactccgagtaatgcctgagtttaactgcacaccgaacattttctcctacagcattcttttcaagggtctttgcaatgaaaggagaagccaagaggctcttgagctgattaatattatggttgaggatggaggtagctgccaacctgatgtggtgacctataacactgtaattgatggcttgttgaaagagggtgaggtggaccaagcttacagcctattttctgaaatgctgcgtcagggggtatcaccgaatgttgtgacatgtaattcaatcatctctggcatgtgcaagcttcacgcgatggacaaggctgaggaggttcttcaacagatgcttgatagacgaattctgccagatgttgccacatataatagtctgatacatggatattattcattaggacagtgcgaagaggtggatcggattttcaaggagatgactacaaatggtgttcaaccagatgttgtaacttacaatatacagatggattatctttgcaagaatggaagatgcgcagaagctaggaagatttttgattccatgatcagtttgggccaaaaacctactgttactacctacaacattctgcttcatgggtatgctatggaaagatcttttcatgatatgaattgtctcattgagttgatggatgataatggtatttcaccagatcattatggctacaacatactcatatctgcttatgctaaagaaaaaatggttgatgatgtattgcatatatttacaaaaatgcggcagcaaggattgaaccctgatgttgcgaactatggagcggtaataaacttgctttctagtattggccgaatggatgatgctatgtcccaatacaatcaaatgataaatgaagggttagctcctgatatcatagttttcaactcccttattagtggtttctgttcttgtggcaaatgggagaaggttcatgaactattttctgagatgttggatcgcggcatctgtcccaacacagtgttcttcaccactattatggaccgcctttgcaaaaatggaagggttatggaagcccaagatctcttccaggcagatcgccggcggcgaccaggcaatgttagccaggttgaaggagatcct

SEQ ID NO: 2153 - DNA, 1779 bp, Triticum aestivum
atggtgagcatcggcgagcatgctcgtcctcctaactctgctttccttcttcctaatcccagttcatgcccaggttgcgccggtgcggtggggggcgagcggcgccggcgtcctctgggtcctctgccattaccagattcttccagatccataagtggagctatgagccgccgcgccgttcccgctggcaggcgcatcttggagcagaacatcaaggcccggtaccgggctggagccattggcaccgacgatgcactccacctgtttgacgaattgctccaggttgcctggccctcctcgatcgccgccatcaactgcctcctcattgtcgtcggccgtgattgccctgtgctcgccgtctccctcttcaaccacatcgcaagagccaaggtggcgccccacaatatcacctacggcattctagtcgactgctgcagccgtgctggccgcttggaccttggcttcgctgccatgggccacatcgttaagatgggatttgtggcaagatccgttgtctctttcagccacctgctcagggccgtctgtgcgaagaagaagaccagctacagaatggacatcatgctccaaattatgcctgagcttaactgcataccggatgtttactcctacagcattcttttcaagggcctctgcaatgagaagagaagccaagaggctctcgagctgattcacgtgatggttgagcacggaggtagctgccaacctaatctggtctcatacaacaccgtaattgatggcttgttgaaagagggtgaggtgggcaaggcttacagcctattttgtgaaatggtacagagcgggattttggcaaatattgtgacatacaactcaatcatctctggcatgtgcaaggttcatgcaatggacaaggctgagaaggttcttcaacagatgtttgatagagaaattctgccagatactgccacatatactaccctaatacgtggatattattcatcaggacaatgcaaagaggtggaacgggttttcgagcacatgtctataaatggtgttcaaccaaatatgataacttgcaatatacagatggattatctttgcaagagcggaagatgcgcggaagctaggaagatctttgattctatggtcagtttgggccaaaaaccgtctgttactacctacagtattctgcttcatggttatgttatggaaaaatcatttcatgatatgcattgtctccttgatttgatggtagaaaatggtatctcaccagatcatcatgtctacaacatactcatatctgcatatgctaaagaggaaatggcaagtgaggtaatgcatatatttacaaaaatgcggcagcaaggattgaaccctagtgttgcggactatggagcggtaataaacttgctctccagtattggcagaatggatgatgctatgtcccaattcaatcaaatgatagccgaaggattagctcctgatatcatagttttcaacccccttattagtggtttttgtacttgtggcaaatgggagaagkttcatgaactattttctgaaatgttgaatcgcggcacctatcatgataccgtgttcttcaccacaattatggaccgcctttgcaaaaatggaagggttatggaagcccaagatatgtttgacctgatggtacacgtgggtgttaagcctaatgttcatacttatgccacattgatgcatgggtactttttcgttaggaagatggatgaagtgaggaagttacttggcaatatactctcaattggctcgaaaccggat

SEQ ID NO: 2154 - DNA, 1779 bp, Triticum aestivum
atggtgagcatcggcgagcatgctcgtcctcctaactctgctttccttcttcctaatcccagttcatgcccaggttgcgccggtgcggtggggggcgagcggcgccggcgtcctctgggtcctctgccattaccagattcttccagatccataagtggagctatgagccgccgcgccgttcccgctggcaggcgcatcttggagcagaacatcaaggcccggtaccgggctggagccattggcaccgacgatgcactccacctgtttgacgaattgctccaggttgcctggccctcctcgatcgccgccatcaactgcctcctcattgtcgtcggccgtgattgccctgtgctcgccgtctccctcttcaaccacatcgcaagagccaaggtggcgccccacaatatcacctacggcattctagtcgactgctgcagccgtgctggccgcttggaccttggcttcgctgccatgggccacatcgttaagatgggatttgtggcaagatccgttgtctctttcagccacctgctcagggccgtctgtgcgaagaagaagaccagctacagaatggacatcatgctccaaattatgcctgagcttaactgcataccggatgtttactcctacagcattcttttcaagggcctctgcaatgagaagagaagccaagaggctctcgagctgattcacgtgatggttgagcacggaggtagctgccaacctaatctggtctcatacaacaccgtaattgatggcttgttgaaagagggtgaggtgggcaaggcttacagcctattttgtgaaatggtacagagcgggattttggcaaatattgtgacatacaactcaatcatctctggcatgtgcaaggttcatgcaatggacaaggctgagaaggttcttcaacagatgtttgatagagaaattctgccagatactgccacatatactaccctaatacgtggatattattcatcaggacaatgcaaagaggtggaacgggttttcgagcacatgtctataaatggtgttcaaccaaatatgataacttgcaatatacagatggattatctttgcaagagcggaagatgcgcggaagctaggaagatctttgattctatggtcagtttgggccaaaaaccgtctgttactacctacagtattctgcttcatggttatgttatggaaaaatcatttcatgatatgcattgtctccttgatttgatggtagaaaatggtatctcaccagatcatcatgtctacaacatactcatatctgcatatgctaaagaggaaatggcaagtgaggtaatgcatatatttacaaaaatgcggcagcaaggattgaaccctagtgttgcggactatggagcggtaataaacttgctctccagtattggcagaatggatgatgctatgtcccaattcaatcaaatgatagccgaaggattagctcctgatatcatagttttcaacccccttattagtggtttttgtacttgtggcaaatgggagaagtttcatgaactattttctgaaatgttgaatcgcggcacctatcatgataccgtgttcttcaccacaattatggaccgcctttgcaaaaatggaagggttatggaagcccaagatatgtttgacctgatggtacacgtgggtgttaagcctaatgttcatacttatgccacattgatgcatgggtactttttcgttaggaagatggatgaagtgaggaagttacttggcaatatactctcaattggctcgaaaccggat

SEQ ID NO: 2155 - DNA, 1779 bp, Triticum aestivum; identical to SEQ ID NO: 2154

SEQ ID NO: 2156 - DNA, 762 bp, Triticum aestivum
atgtctataaatggtgttcaaccaaatatgataacttacaatatacagatggattatctttgcaagagcggaagatgcgcggaagctaggaagatctttgattctatggtcagtttgggccaaaaaccgtytgttactacmtacagtattctgcttcatggttatgttatggaaaaatcatttcatgatatgcattgtctccttgatttgatggtagaaaatggtatctcaccagatcatcatgtctacaacatactcatatctgcatatgctaaagaggaaatggcaagtgaggtaatgcatatatttacaaaaatgcggcagcaaggattgaaccctagtgttgcggactatggagcggtaataaacttgctttccagtattggcagaatggatgatgctatgtcccaattcaatcaaatgatagccgaaggattagctcctgatatcatagttttcaacccccttattagtggtttttgtacttgtggcaaatgggagaaggttcatgaactattttctgaaatgttgaatcgcggcacctatcctgataccgtgttcttcaccacaattatggaccgcctttgcaaaaatggaagggttatggaagcccaagatatgtttgacctgatggtacacgtgggtgttaagcctaatgttcatacttatgccacattgatgcatgggtactttttcgttaggaagatggatgaagtgaggaagttacttggcaatatgctctcaattggctcgaaaccggat

SEQ ID NO: 2157 - DNA, 1779 bp, Triticum aestivum; identical to SEQ ID NO: 2154

SEQ ID NO: 2158 - DNA, 1779 bp, Triticum aestivum
atggtgagcatcggcgagcatgctcgtcctcctaactctgctttccttcttcctaatcccagttcatgcctaggttgcgtcggtgcggtggggggcgagcggcaccggcgtcctctgggtcctctgcgattaccagattcttccagatccataggtggagctatgagccgccgcaccgtccccgctggcaggcgcatcttggagcagaacatcaaggcccggtaccgggctggagccattggcaccgacgatgcactccacctgtttgacgaattgctccaggttgcctggccctcctcgatcgccgccatcaactgcctcctcattgtcgtcggccgtgattgccctgcgctcgccgtctccctcttcaaccacatcgcaagagccaaggtggcgccccacaatatcacctacggcattctagtcgactgctgcagccatgctggccgcttggaccttggcttcgctgccatgggccacatcgttaagacggtatttgcggcaggatccattgtctctttcagccacctgctcagggccgtctgtgcggagaagaagaccagctacggaatggacatcgtgctccgaattatgcctgagcttaactgcataccggatgtttactcctacagcatgcttttcaagggcctctgcaacgagaagagaagccaagaggctctcgagatgattcacgtgatggttgagcacggaggtagctgccaacctaatctggtctcatacaacgccgtaattgatggcttgttgaaagagggtgaggtgggcaaggcttacatcctattttgtgaaatggtacagagcgggattttggcaaatattgtgacctacaactcaattatctctggcatgtgcaaggttcatgcaatggacaaggctgagaaggttcttcaacagatgtttgatagagaaattctgccagatactgccacatatactagcctaatacatggatgttattcatcaggacaatgcaaagaggtggaacgggttttcgagcacatgtctataaatggtgttcaaccaaatatgataacttacaatatacagatggattatctttgcaagagcggaagatgcgcggaagctaggaagatctttgattctatggtcagtttgggccaaaaaccgtctgttactacctacagtattctgcttcatggttatgttatggaaaaatcatttcatgatatgcattgtctccttgatttgatggtagaaaatggtatctcaccagatcatcatgtctacaacatactcatatctgcatatgctaaagaggaaatggcaagtgaggtaatgcatatatttacaaaaatgcggcagcaaggattgaaccctagtgttgcggactatggagcggtaataaacttgcattccagtattggcagaatggatgatgctatgccccaattcaatcaaatgatagccgaaggattagctcctgatatcatagttttcaacccccttattagtggtttttgtacttgtggcaaatgggagaaggttcatgaactattttctgaaatgttgaatcgcggcacctatcatgataccgtgttcttcaccacaattatggaccgcctttgcaaaaatggaagggttatggaagcccaagatatgtttgacctgatggtacacgtgggtgttaagcctaatgttcatacttatgccacattgatgcatgggtactttttcgttaggaagatggatgaagtgaggaagttacttggcaatatgctctcaattggctcgaaaccggat

SEQ ID NO: 2159 - DNA, 1779 bp, Triticum aestivum
atggtgagcatcggcgagcatgctcgtcctcctaactctgctttccttcttcctaatcccagttcatgcccaggttgcgtcggtgcggtggggggcgagcggcaccggcgtcctctgggtcctctgccattaccagattcttccagatccataggtggagctatgagccgccgcgccgtccccgctggcaggcgcatcttggagcagaacatcaaggcccggtaccgggctggagccattggcaccgacgatgcactccacctgtttgacgaattgctccaggttgcctggccctcctcgatcgccgccatcaactgcctcctcattgtcgtcggccgtgattgccctgcgctcgccgtctccctcttcaaccacatcgcaagagccaaggtggcgccccacaatatcacctacggcattctagtcgactgctgcagccgtgctggccgcttggaccttggcttcgctgccatgggccacatcgttaagacgggatttgcggcaggatccgttgtctctttcagccacctgctcagggccgtctgtgcggagaagaagaccagctacggaatggacatcgtgctccgaattatgcctgagcttaactgcataccggatgtttactcctacagcattcttttcaagggcctctgcaacgagaagagaagccaagaggctctcgagctgattcacgtgatggttgagcacggaggtagctgccaacctaatctggtctcatacaacaccgtaattgatggcttgttgaaagagggtgaggtgggcaaggcttacagcctattttgtgaaatggtacagagcgggattttggcaaatattgtgacctacaactcaatcatctctggcatgtgcaaggttcatgcaatggacaaggctgagaaggttcttcaacagatgtttgatagagaaattctaccagatactgccacatatactagcctaatacatggatattattcatcaggacaatgcaaagaggtggaacgggttttcgagcacatgtctataaatggtgttcaaccaaatatgataacttacaatatacagatggattatctttgcaagagcggaagatgcgcggaagctaggaagatctttgattctatggtcagtttgggccaaaaaccgtctgttactacctacagtattctgcttcatggttatgttatggaaaaatcatttcatgatatgcattgtctccttgattttatggtagaaaatggtatctcaccagatcatcatgtctacaacatactcatatctgcatatgctaaagaggaaatggcaagtgaggtaatgcatatatttacaaaaatgcggcagcaaggattgaaccctagtgttgcggactatggagcggtaataaacttgctttccagtattggcagaatggatgatgctatgtcccaattcaatcaaatgatagccgaaggattagctcctgatatcatagttttcaacccccttattagtggtttttgtacttgtggcaaatgggagaaggttcatgaactattttctgaaatgttgaatcgcggcacctatcatgataccgtgttcttcaccacaattatggaccgcctttgcaaaaatggaagggttatggaatcccaagatatgtttgacctgatggtacacgtgggtgttaagcctaatgttcatacttatgccacattgatgcatgggtactttttcgttaggaagatggatgaagtgaggaagttagttggcaatatgctctcaattggctcgaaaccggat

SEQ ID NO: 2160 - DNA, 1779 bp, Triticum aestivum
atggtgagcatcggcgagcatgctcgtcctcctaactctgctttccttcttcctaatcccagttcatgcctaggttgcgtcggtgcggtggggggcgagcggcaccggcgtcctctgggtcctctgcgattaccagattcttccagatccataggtggagctatgagccgccgcgccgtccccgctggcaggcgcatcttggagcagaacatcaaggcccggtaccgggctggagccattggcaccgacgatgcactccacctgtttgacgaattgctccaggttgcctggccctcctcgatcgccgccatcaactgcctcctcattgtcgtcggccgtgattgccctgcgctcgccgtctccctcttcaaccacatcgcaagagccaaggtggcgccccacaatatcacctacggcattctagtcgactgctgcagccatgctggccgcttggaccttggcttcgctgccatgggccacatcgttaagacggtatttgcggcaggatccattgtctctttcagccacctgctcagggccgtctgtgcggagaagaagaccagctacggaatggacatcgtgctccgaattatgcctgagcttaactgcataccggatgtttactcctacagcatgcttttcaagggcctctgcaacgagaagagaagccaagaggctctcgagatgattcacgtgatggttgagcacggaggtagctgccaacctaatctggtctcatacaacgccgtaattgatggcttgttgaaagagggtgaggtgggcaaggcttacatcctattttgtgaaatggtacagagcgggattttggcaaatattgtgacctacaactcaattatctctggcatgtgcaaggttcatgcaatggacaaggctgagaaggttcttcaacagatgtttgatagagaaattctgccagatactgccacatatactagcctaatacatggatgttattcatcaggacaatgcaaagaggtggaacgggttttcgagcacatgtctataaatggtgttcaaccaaatatgataacttacaatatacagatggattatctttgcaagagcggaagatgcgcggaagctaggaagatctttgattctatggtcagtttgggccaaaaaccgtctgttactacctacagtattctgcttcatggttatgttatggaaaaatcatttcatgatatgcattgtctccttgatttgatggtagaaaatggtatctcaccagatcatcatgtctacaacatactcatatctgcatatgctaaagaggaaatggcaagtgaggtaatgcatatatttacaaaaatgcggcagcaaggattgaaccctagtgttgcggactatggagcggtaataaacttgcattccagtattggcagaatggatgatgctatgccccaattcaatcaaatgatagccgaaggattagctcctgatatcatagttttcaacccccttattagtggtttttgtacttgtggcaaatgggagaaggttcatgaactattttctgaaatgttgaatcgcggcacctatcctgataccgtgttcttcaccacaattatggaccgcctttgcaaaaatggaagggttatggaagcccaagatatgtttgacctgatggtacacgtgggtgttaagcctaatgttcatacttatgccacattgatgcatgggtactttttcgttaggaagatggatgaagtgaggaagttacttggcaatatgctctcaattggctcgaaaccggat

SEQ ID NO: 2161 - DNA, 1779 bp, Triticum aestivum
atggtgagcatcggcgagcatgctcgtcctcctaactctgctttccttcttcctaatcccagttcatgcccaggttgcgtcggtgcggtggggggcgagcggcatcggcgtcctctgggtcctctgccattaccagattcttccagatccataggtggagctatgagccgccgcgccgtccccgctggcaggcgcatcttggagcagaacatcaaggcccggtaccgggctggagccattggcaccgacgatgcactccacctatttgacgaattgctccaggttgcctggccctcctcgatcgccgccatcaactgcctcctcattgtcgtcggccgtgattgccctgcgcttgccgtctccctcttcaaccacatcgcaagagccaaggtggcgccccacaatatcacctacggcattctagtcgactgctgcagccatgctggccgcttggaccttggcttcgctgccatgggccacatcgttaagacggtatttgcgacaggatccattgtctctttcagccacctgctcagggccgtctgtgcggagaagaagaccagctacggaatggacatcgtgctccgaattatgcctgagcttaactgcataccggatgtttactcctacagcatgcttttcaagggcctctgcaacgagaagagaagccaagaggctctcgagatgattcacgtgatggttgagcacggaggtagctgccaacctaatctggtctcatacaacgccataattgatggcttgttgaaagagggtgaggtgggcaaggcttacagcctattttgtgaaatggtacagagcgggattttggcaaatattgtgacctacaactcaatcatctctggcatgtgcaaggttcatgcaatggacaaggctgagaaggttcttcaacagatgtttgatagagaaattctgccagatactgccacatatactagcctaatacatggatgttattcatcaggacaatgcaaagaggtggaacgggttttcgagcacatgtctataaatggtgttcaaccaaatatgataacttacaatatacagatggattatctttgcaagagcggaagatgcacggaagctaggaagatctttgattctatggtcagtttgggccaaaaaccgtctgttactacctacagtattctgcttcatggttatgttatggaaaaatcatttcatgatatgcattgtctccttgatttgatggtagaaaatggtatctcaccagatcatcatgtctacaacatactcatatctgcatatgctaaagaggaaatggcaagtgaggtaatgcatatatttacaaaaatgcggcggcaaggattgaaccctagtgttgcggactatggagcggtaataaacttgctttccagtattggcagaatggatgatgctatgccccaattcaatcaaatgatagccgaagtattagctcctgatatcatagttttcaacccccttattagtggtttttgtacttgtggcaaatgggagaaggttcatgaactattttctgaaatgttgaatcgcggcacctatcctgataccgtgttcttcaccacaattatggaccgcctttgcaaaaatggaagggttatggaagcccaagatatgtttgacctgatggtacacgtgggtgttaagcctaatgttcatacttatgccacattgatgcatgggtactttttcgttaggaagatggatgaagtgaggaagttacttggcaatatgctctcaattggctcgaaaccggat

SEQ ID NO: 2162 - DNA, 1779 bp, Triticum aestivum
atggtgagcatcggcgagcatgctcgtcctcctaactctactttccttcttcctaatcccagttcatgcccaggttgcgccggtgcggtggggggcgagcggcaccggcgtcctctgggtcctctgccattaccagattcttccagatccataggtggagctatgagccgccgcgccgtccccgctggcaggcgcatcttggagcagaacatcaaggcccggtaccgggctggagccattggcaccgacgatgcactccacctgtttgacgaattgctccaggttgcctggccctcctcgatcgccgccatcaactgcctcctcattgtcgtcggccgtgattgccctacgctcgccgtctccctcttcaaccacatcgcaagagccaaggtggcgccccacaatatcacctacggcattctagtcgactgctgcagccgtgctggccgcttggaccttggcttcgctgccatgggccacatcgttaagacgggatttgcggcaggatccgttgtctcttttagccacctgctcagggccgtctgtgcggagaagaagaccagctacggaatggacatcgtgctccgaattatgcctgagcttaactgcataccggatgtttactcctacagcattcttttcaagggcctctgcaacgagaagagaagccaagaggctctcgagctgattcacgtgatggttgagcacggaggtagctgccaacctaatctggtctcatacaacaccgtaattgatggcttgttgaaagagggtgaggtgggcaaggcttacagcctattttgtgaaatggtacagagcgggattttggcaaatattgtgacctacaactcaatcatctctggcatgtgcaaggttcatgcaatggacaaggctgagaaggttcttcaacagatgtttgatagagaaattctgccagatactgccacatatactagcctaatacatggatattattcatcaggacaatgcaaagaggtggaacgggttttcgagcacatgtctataaatggtgttcaaccaaatatgataacttacaatatacagatggattatctttgcaagagcggaagatgcgcggaagctaggaagatctttgattctatggtcagtttgggccaaaaaccgtttgttactacatacagtattctgcttcatggttatgttatggaaaaatcatttcatgatatgcattgtctccttgatttgatggtagaaaatggtatctcaccagatcatcatgtctacaacatactcatatctgcatatgctaaagaggaaatggcaagtgaggtaatgcatatatttacaaaaatgcggcagcaaggattgaaccctagtgttgcggactatggagcggtaataaacttgctttccagtattggcagaatggatgatgctatgtcccaattcaatcaaatgatagccgaaggattagctcctgatatcatagttttcaacccccttattagtggtttttgtacttgtggcaaatgggagaaggttcatgaactattttctgaaatgttgaatcgcggcacctatcctgataccgtgttcttcaccacaattatggaccgcctttgcaaaaatggaagggttatggaagcccaagatatgtttgacctgatggtacacgtgggtgttaagcctaatgttcatacttatgccacattgatgcatgggtactttttcgttaggaagatggatgaagtgaggaagttacttggcaatatgctctcaattggctcgaaaccggat

SEQ ID NO: 2163 - DNA, 1779 bp, Triticum aestivum
  misc_feature (1269)..(1269): n is a, c, g, or t
atggtgagcatcggtgagcatgctcgtcctcctaactctgctttccttcttcctaatcccagttcatgcccaggttgcgccggtgcggtggggggcgagcggcgccggcgtcctctgggtcctttgccattaccagattcttccagatccataggtggagctatgagccgccgcgccgtccccgctggcaggcgcatcttggagcagaacatcaaggcccggtaccgggctggagccattggcaccgacgatgcactccacctgtttgacgaattgctccaggttgcctggccctcctcgatcgccgccatcaactgcctcctcattggcgtcggccgtgattgccctgcgctcgccgtctccctcttcaaccacatcgcaagagccaaggtggcgccccacaatatcacctacggcattctagtcgactgctgcagccgtgctggccgcttggaccttggcttcgctgccatgggccacatcgttaagacgggatttgcggcaggatccgttgtctctttcagccacctgctcagggccgtctgtgcgaagaagaagaccagctacggaatggacatcgtgctccgaattatgcctgagcttaactgcataccggatgtttactcctacggcattcttttcaagggcctctgcaacgagaagagaagccaagaggctctcgagctgattcacgtgatggttgagcacggaggtagctgccaacctaatctggtctcatacaacaccgtaattgatggcttgttgaaagagggtgaggtgggcaaggcttacatcctattttgtgaaatggtacagagcgggattttggcaaatcttgtgacctacaactcaatcatctctggcatgtgcaaggttcatgcaatggacaaggctgagaaggttcttcaacagatgtttgatagagaaattctgccagatactgccacatatactagcctaatacatggatattattcatcaggacaatgcaaagaggtggaacgggttttcgagcacatgtctataaatggtgttcaaccaaatatgataacttacaatatacagatggattatctttgcaagagcggaagatgcgcggaagctaggaagatctttgattctatggtcagtttgggccaaaaaccgtctgttactacctacagtattctgcttcatggttatgttatggaaaaatcatttcatgatatgcattgtctccttgatttgatggtagaaaatggtatctcaccagatcatcatgtctacaanatactcatatctgcatatgctaaagaggaaatggcaagtgaggtaatgcatatatttacaaaaatgcggcagcaaggattgaaccctagtgttgcggactatggagcggtaataaacttgctttccagtattggcagaatggatgatgctatgtcccaattcaatcaaatgatagccgaaggattagctcctgatatcatagttttcaacccccttattagtggtttttgtacttgtggcaaatgggagaaggttcatgaactattttctgaaatgttgaatcgcggcacctatcctgataccgtgttcttcaccacaattatggaccgcctttgcaaaaatggaagggttatggaagcccaagataagtttgacctgatggtacacatgggtgttaagcctaatgttcatacttatgccacattgatgcatcggtactttttcgttatgaagatggatgaagtgaggaagttacttggcaatatgctctcaattggctcgaaaccggat

SEQ ID NO: 2164 - DNA, 1779 bp, Triticum aestivum
atggtgagcatcggcgagcatgctcgtcctcctaactctgctttccttcttcctaatcccagttcatgcccaggttgcgtcggtgcggtggggggcgagcggcaccggcgtcctctaggtcctctgccattaccagattcttccagatccataggtggagctatgagccgccgcgccgtccccgctggcaggcgcatcttggagcagaacatcaaggcccggtaccgggctggagccattggcaccgacgatgcactccacctgtttgacgaattgctccaggttgcctggccctcctcgatcgccaccatcaactgcctcctcattgtcgtcggccgtgattgccctgcgctcgccgtctccctcttcaaccacatcgcaagagccaatgtggcgccccacaatatcacctacggcattctagtcgactgctgcagccgtgctggccgcttggaccttggcttcgctgccatgggccacatcgttaagacgggatttgcggcaggatccgttatctctttcagccacctgctcagggccgtctgtgcggagaagaagaccagctacggaatggacatcgtgctccgaattatgcctgagcttaactgcataccggatgtttactcctacagcattcttttcaagggcctctgcaacgagaagagaagccaagaggctctcgagctgattcacgtgatggttgagcacggaggtagctgccaacctaatctggtctcatacaacaccgtaattgatggcttgttgaaagagggtgaggtgggcaaggcttacagcctattttgtgaaatggtacagagcgggattttggcaaatattgtgacctacaactcaatcatctctggcatgtgcaaggttcatgcaatggacaaggctgagaaggttcttcaacagatgtttgatagagaaattctaccagatactgccacatatactagcctaatacatggatattattcatcaggacaatgcaaagaggtggaacgggttttcgagcacatgtctataaatggtgttcaaccaaatatgataacttacaatatacagatggattatctttgcaagagcggaagatgcgcggaagctaggaagatctttgattctatggtcagtttgggccaaaaaccgtctgttactacctacagtattctgcttcatggttatgttatggaaaaatcatttcatgatatgcattgtctccttgattttatggtagaaaatggtatctcaccagatcatcatgtctacaacatactcatatctgcatatgctaaagaggaaatggcaagtgaggtaatgcatatatttacaaaaatgcggcagcaaggattgaaccctagtgttgcggactatggagcggtaataaacttgctttccagtattggcagaatggatgatgctatgtcccaattcaatcaaatgatagccgaaggattagctcctgatatcatagttttcaacccccttattagtggtttttgtacttgtggcaaatgggagaaggttcatgaactattttctgaaatgttgaatcgcggcacctatcatgataccgtgttcttcaccacaattatggaccgcctttgcaaaaatggaagggttatggaatcccaagatatgtttgacctgatggtacacgtgggtgttaagcctaatgttcatacttatgccacattgatgcatgggtactttttcgttaggaagatggatgaagtgaggaagttagttggcaatatgctctcaattggctcgaaaccggat

SEQ ID NO: 2165 - DNA, 1779 bp, Triticum aestivum
atggtgagcatcggcgagcatgctcgtcctcctaactctgctttccttcttcctaatcccagttcatgcccaggttgcgccggtgcggtggggggcgagcggcgccggcgtcctctgggtcctctgccattaccagattcttccagatccataggtggagctatgagccgccgcgctgtccccgctggcaggtgcatcttggagcagaacatcaaggcccggtaccgggctggagccattggcaccgacgatgcactccacctgtttgacgaactgctccaggttgcctggccctcctcgatcgccgccatcaactgccccctcattgtcgtcggccgtgattgccctgcgctcgccgtctccctcttcaaccacatcgcaagagccaaggtggcgccccacaatatcacctacggcattctagtcgactgctgcagccgtgctggccgcttggaccttggcttcgctgccatgggccacatcgttaagacgggatttgcggcaggatccgttgtctctttcagccacctgctcagggccgtctgtgcgaagaagaagaccagctacggaatggacatcgtgctccgaattatgcctgagcttaactgcataccggatgtttactcctacggcattcttttcaagggcctctgcaacgagaagagaagccaagaggctctcgagctgattcacgtgatggttgagcacggaggtagctgccaacctaatctggtctcatacaacaccataattgatggcttgttgaaagagggtgaggtgggcaaggcttacatcctattttgtgaaatggtacagagcgggattttggcaaatattgtgacctacaactcaatcatctctggcatgtgcaaggttcatgcaatggacaaggctgagaaggttcttcaacagatgtttgatagagaaattctgccagatactgccacatatactagcctaatacatggatattattcatcaggacaatgcaaagaggtggaacgggttttcgagcacatgtctataaatggtgttcaaccaaatatgataacttacaatatacagatggattatctttgcaagagcggaagatgcgcggaagctaggaagatctttgattctatggtcagtttgggccaaaaaccgtctgttactacctacagtattctgcttcatggttatgttatggaaaaatcatttcatgatatgcattgtctccttgatttgatggtagaaaatggtatctcaccagatcatcatgtctacaagatactcatatctgcatatgctaaagaggaaatggcaagtgaggtaatgcatatatttacaaaaatgcggcagcaaggattgaaccctagtgttgcggactatggagcggtaataaacttgctttccagtattggcagaatggatgatgctatgtcccaattcaatcaaatgatagccgaaggattagctcctgatatcatagttttcaacccccttattagtggtttttgtacttgtggcaaatggcagaaggttcatgaactattttctgaaatgttgaatcgcggcacctatcctgataccgtgttcttcaccacaattatggactgcatttgcaaaaatggaagggttatggaagcccaagatatgtttgacctgatggtacacgtgggtgttaagcctaatgttcatacttatgccacattgatgcatgggtactttttcgttaggaagatggatgaagtgaggaagttacttggcaatatgctctcaattggctcgaaaccggat

SEQ ID NO: 2166 - DNA, 1779 bp, Triticum aestivum
atggtgagcatcggcgagcatgctcgtcctcctaactctgctttccttcttcctaatcccagttcatgcccaggttgcgccggtgcggtggggggcgagcggcgccggcgtcctctgggtcctctgccactaccagattcttccagatccataggtggagctatgagccgccgcgccgtccccgctggcaggcgcatcttggagcagaacatcaaggcccggtaccgggctggagccattggcaccgacgatgcactccacctgtttgacgaattgctccaggttgcctggccctcctcgatcgccgccatcaactgcctcctcattgtcgtcggccgtgattgccctgcgctcgccgtctccctcttcaaccacatcgcaagagccaaggtggcgccccacaatatcacctacggcattctagtcgactgctgcagccgtgctggccgcttggaccttggcttcgctgccatgggccacatcgttaagacgggatttgcggcaggatccgttgtctcttttagccacctgctcagggccgtctgtgcggagaagaagaccagctacggaatggacatcgtgctccgaattatgcctgagcttaactgcataccggatgtttactcctacagcattcttttcaagggcctctgcaacgagaagagaagccaagaggctctcgagctgattcacgtgatggttgagcacggaggtagctgccaacctaatctggtctcatacaacaccgtaattgatggcttgttgaaagaaggtgaggtgggcaaggcttacagcctattttgtgaaatggtacagagcgggattttggcaaatattgtgacctacaactcaatcatctctggcatgtgcaaggttcatgcaatggacaaggctgagaaggttcttcaacagatgtttgatagagaaattctgccagatactgccacatatactagcctaatacatggatattattcatcaggacaatgcaaagaggtggaacgggttttcgagcacatgtctataaatggtgttcaaccaaatatgataacttacaatatacagatggattatctttgcaagagcggaagatgcgcggaagctaggaagatctttgattctatggtcagtttgggccaaaaaccgtttgttactacatacagtattctgcttcatggttatgttatggaaaaatcatttcatgatatgcattgtctccttgatttgatggtagaaaatggtatctcaccagatcatcatgtctacaacatactcatatctgcatatgctaaagaggaaatggcaagtgaggtaatgcatatatttacaaaaatgcggcagcaaggattgaaccctagtgttgcggactatggagcggtaataaacttgctttccagtattggcagaatggatgatgctatgtcccaattcaatcaaatgatagccgaaggattagctcctgatatcatagttttcaacccccttattagtggtttttgtacttgtggcaaatgggagaaggttcatgaactattttctgaaatgttgaatcgcggcacctatcctgataccgtgttcttcaccacaattatggaccgcctttgcaaaaatggaagggttatggaagcccaagatatgtttgacctgatggtacacgtgggtgttaagcctaatgttcatacttatgccacattgatgcatgggtactttttcgttaggaagatggatgaagtgaggaagttacttggcaatatgctctcgattggctcgaaaccggat

SEQ ID NO: 2167 - DNA, 1779 bp, Triticum aestivum
atggtgagcatcggcgagcatgctcgtcctcctaactctgctttccttcttcctaatcccagttcatgcccaggttgcgtcggtgcggtggggggcgagcggcaccggcgtcctctgggtcctctgccattaccagattcttccagatccataggtggagctatgagccgccgcgccgtccccgctggcaggcgcatcttggagcagaacatcaaggcccggtaccgggctggagccattggcaccgacgatgcactccacctgtttgacgaattgctccaggttgcctggccctcctcgatcgccgccatcaactgcctcctcattgtcgtcggccgtgattgccctgcgctcgccgtctccctcttcaaccacatcgcaagagccaaggtggcgccccacaatatcacctacggcattctagtcgactgctgcagccgtgctggccgcttggaccttggcttcgctgccatgggccacatcgttaagacgggatttgcggcaggatccgttgtctctttcagccacctgctcagggccgtctgtgcggagaagaagaccagctacggaatggacatcgtgctccgaattatgcctgagcttaactgcataccggatgtttactcctacagcattcttttcaagggcctctgcaacgagaagagaagccaagaggttctcgagctgattcacgtgatggttgagcacggaggtagctgccaacctaatctggtctcatacaacaccgtaattgatggcttgttgaaagagggtgaggtgggcaaggcttacagcctattttgtgaaatggtacagagcgggattttggcaaatattgtgacctacaactcaatcatctctggcatgtgcaaggttcatgcaatggacaaggctgagaaggttcttcaacagatgtttgatagagaaattctgccagatactgccacatatactagcctaatacatggatgttattcatcaggacaatgcaaagaggtggaacgggttttcgagcacatgtctataaatggtgttcaaccaaatatgataacttacaatgtacagatggattatctttgcaagagcggaagatgcgcggaagctaggaagatctttgattctatggtcagtttgggccaaaaaccgtctgttactacctacagtattctgcttcatggttatgttatggaaaaatcatttcatgatatgcattgtctccttgatttgatggtagaaaatggtatctcaccagatcatcatgtctacaacatactcatatctgcatatgctaaagaggaaatggcaagtgaggtaatgcatatatttacaaaaatgcggcagcaaggattgaaccctagtgttgcggactatggagcggtaataaacttgctttccagtattggcagaatggatgatgctatgtcccaattcaatcaaatgatagccgaaggattagctcctgatatcatagttttcaacccccttattagtggtttttgtacttgtggcaaatgggagaaggttcatgaactattttctgaaatgttgaatcgcggcacctatcctgataccgtgttcttcaccacaattatggaccgcctttgcaaaaatggaagggttatggaagcccaagatatgtttgacctgatggtacacgtgggtgttaagcctaatgttcatacttatgccacattgatgcatgggtactttttcgttaggaagatggatgaagtgaggaagttacttggcaatatgctctcaattggctcgaaaccggat

SEQ ID NO: 2168 - DNA, 1779 bp, Triticum aestivum
atggtgagcatcggcgagcatgctcgtcctcctaactctgctttccttcttcctaatcccagttcatgcccaggttgcgtcggtgcggtggggggcgagcggcatcggcgtcctctgggtcctctgccattaccagattcttccagatccataggtggagctatgagccgccgcgccgtccccgctggcaggcgcatcttggagcagaacatcaaggcccggtaccgggctggagccattggcaccgacgatgcactccacctatttgacgaattgctccaggttgcctggccctcctcgatcgccgccatcaactgcctcctcattgtcgtcggccgtgattgccctgcgctcgccgtctccctcttcaaccacatcgcaagagccaaggtggcgccccacaatatcacctacggcattctagtcgactgctgcagccatgctggccgcttggaccttggcttcgctgccatgggccacatcgttaagacggtatttgcgacaggatccattgtctctttcagccacctgctcagggccgtctgtgcggagaagaagaccagctacggaatggacatcgtgctccgaattatgcctgagcttaactgcataccggatgtttactcctacagcatgcttttcaagggcctctgcaacgagaagagaagccaagaggctctcgagatgattcacgtgatggttgagcacggaggtagctgccaacctaatctggtctcatacaacgccataattgatggcttgttgaaagagggtgaggtgggcaaggcttacagcctattttgtgaaatggtacagagcgggattttggcaaatattgtgacctacaactcaatcatctctggcatgtgcaaggttcatgcaatggacaaggctgagaaggttcttcaacagatgtttgatagagaaattctgccagatactgccacatatactagcctaatacatggatgttattcatcaggacaatgcaaagaggtggaacgggttttcgagcacatgtctataaatggtgttaaaccaaatatgataacttacaatatacagatggattatctttgcaagagcggaagatgcacggaagctaggaagatctttgattctatggtcagtttgggccaaaaaccgtctgttactacctacagtattctgcttcatggttatgttatggaaaaatcatttcatgatatgcattgtctccttgatttgatggtagaaaatggtatctcaccagatcatcatgtctacaacatactcatatctgcatatgctaaagaggaaatggcaagtgaggtaatgcatatatttacaaaaatgcggcggcaaggattgaaccctagtgttgcggactatggagcggtaataaacttgctttccagtattggcagaatggatgatgctatgccccaattcaatcaaatgatagccgaagtattagctcctgatatcatagttttcaacccccttattagtggtttttgtacttgtggcaaatgggagaaggttcatgaactattttctgaaatgttgaatcgcggcacctatcctgataccgtgttcttcaccacaattatggaccgcctttgcaaaaatggaagggttatggaagcccaagatatgtttgacctgatggtacacgtgggtgttaagcctaatgttcatacttatgccacattgatgcatgggtactttttcgttaggaagatggatgaagtgaggaagttacttggcaatatgctctcaattggctcgaaaccggat

SEQ ID NO: 2169 - DNA, 1779 bp, Triticum aestivum
atggtgagcatcggtgagcatgctcgtcctcctaactctgctttccttcttcctaatcccagttcatgcccaggttgcgccggtgcggtggggggcgagcggcgccggcgtcctctgggtcctctgccattaccagattcttccagatccataggtggagctatgagccgccgcgccgtccccgctggcaggcgcatcttggagcagaacatcaaggcccggtaccgggctggagccattggcaccgacgatgcactccacctgtttgacgaattgctccaggttgcctggccctcctcgatcgccgccatcaactgcctcctcattgtcgtcggccgtgattgccctgcgctcgccgtctccctcttcaaccacatcgcaagagccaaggtggcgccccacaatatcacctacggcattctagtcgactgctgcagccgagctggccgcttggaccttggcttcgcggccatgggccacattgttaagacgggatttgcggtaggatccattgtctctttcagccacctgctcagggccgtctgtgcgaagaagaagaccagctacggaatggacatcgtgctccgaattatgcctgagcttaactgcataccggatgtttactcctacagcattcttttcaagggcctctgcaacgagaagagaagccaagaggctctcgagctgattcacgtgatggttgagcacggaggtagctgccaacctaatctggtctcatacaacaccgtaattgatggcttgttgaaagagggtgaggtgggcaaggcttacatcctattttgtgaaatggtacagagcgggattttggcaaatattgtgacctacaactcaatcatctctggcatgtgcaaggttcatgcaatggacaaggctgagaaggttcttcaacagatgtttgatagagaaattctgccagatactgccacatatactagcctaatacatggatattattcatcaggacaatgcaaagaggtggaacgggttttcgagcacatgtctataaatggtgttcaaccaaatatgataacttacaatatacagatggattatctttgcaagagcggaagatgcgcggaagctaggaagatctttgattctatggtcagtttgggccaaaaaccgtctgttactacctacagtattctgcttcatggttatgttatggaaaaatcatttcatgatatgcattgtctccttgatttgatggtagaaaatggtatctcaccagatcatcatgtctacaacatactcatatctgcatatgctaaagaggaaatggcaagtgaggtaatgcatatatttacaaaaatgcggcagcaaggattgaaccctagtgttgcggactatggagcggtaataaacttgctttccagtattggcagaatggatgatgctatgtcccaattcaatcaaatgatagccgaaggattagctcctaatatcatagttttcaacccccttattagtggtttttgtacttgtggcaaatgggagaaggttcatgaactattttctgaaatgttgaatcgcggcacctatcctgataccgtgttcttcaccacaattatggaccgcctttgcaaaaatggaagggttatggaagcccaagatatgtttgacctgatggtacacatgggtgttaagcctaatgttcatacttatgccacattgatgcatcggtactttttcgttaggaagatggatgaagtgaggaagttacttggcaatatgctctcaattggctcgaaaccggat

SEQ ID NO: 2170 - DNA, 1779 bp, Triticum aestivum
atggtgagcatcggtgagcatgctcgtcctcctaactctgctttccttcttcctaatcccagttcatgcccaggttgcgccggtgcggtggggggcgagcggcgccggcgtcctctgggtcctttgccattaccagattcttccagatccataggtggagctatgagccgccgcgccgtccccgctggcaggcgcatcttggagcagaacatcaaggcccggtaccgggctggagccattggcaccgacgatgcactccacctgtttgacgaattgctccaggttgcctggccctcctcgatcgccgccatcaactgcctcctcattggcgtcggccgtgattgccctgcgctcgccgtctccctcttcaaccacatcgcaagagccaaggtggcgccccacaatatcacctacggcattctagtcgactgctgcagccgtgctggccgcttggaccttggcttcgctgccatgggccacatcgttaagacgggatttgcggcaggatccgttgtctctttcagccacctgctcagggccgtctgtgcgaagaagaagaccagctacggaatggacatcgtgctccgaattatgcctgagcttaactgcataccggatgtttactcctacggcattcttttcaagggcctctgcaacgagaagagaagccaagaggctctcgagctgattcacgtgatggttgagcacggaggtagctgccaacctaatctggtctcatacaacaccgtaattgatggcttgttgaaagagggtgaggtgggcaaggcttacatcctattttgtgaaatggtacagagcgggattttggcaaatcttgtgacctacaactcaatcatctctggcatgtgcaaggttcatgcaatggacaaggctgagaaggttcttcaacagatgtttgatagagaaattctgccagatactgccacatatactagcctaatacatggatattattcatcaggacaatgcaaagaggtggaacgggttttcgagcacatgtctataaatggtgttcaaccaaatatgataacttacaatatacagatggattatctttgcaagagcggaagatgcgcggaagctaggaagatctttgattctatggtcagtttgggccaaaaaccgtctgttactacctacagtattctgcttcatggttatgttatggaaaaatcatttcatgatatgcattgtctccttgatttgatggtagaaaatggtatctcaccagatcatcatgtctacaagatactcatatctgcatatgctaaagaggaaatggcaagtgaggtaatgcatatatttacaaaaatgcggcagcaaggattgaaccctagtgttgcggactatggagcggtaataaacttgctttccagtattggcagaatggatgatgctatgtcccaattcaatcaaatgatagccgaaggattagctcctgatatcatagttttcaacccccttattagtggtttttgtacttgtggcaaatgggagaaggttcatgaactattttctgaaatgttgaatcgcggcacctatcctgataccgtgttcttcaccacaattatggaccgcctttgcaaaaatggaagggttatggaagcccaagataagtttgacctgatggtacacatgggtgttaagcctaatgttcatacttatgccacattgatgcatcggtactttttcgttatgaagatggatgaagtgaggaagttacttggcaatatgctctcaattggctcgaaaccggat

SEQ ID NO: 2171 - DNA, 1779 bp, Triticum aestivum
atggtgagcatcggcgagcatgctcgtcctcctaactctgctttccttcttcctaatcccagttcatgcccaggttgcgccggtgcggtggggggcgagcggcgccggcgtcctctgggtcctctgccactaccagattcttccagatccataggtggagctatgagccgccgcgccgtccccgctggcaggcgcatcttggagcagaacatcaaggcccggtaccgggctggagccattggcaccgacgatgcactccacctgtttgacgaattgctccaggttgcctggccctcctcgatcgccgccatcaactgcctcctcattgtcgtcggccgtgattgccctgcgctcgccgtctccctcttcaaccacatcgcaagagccaaggtggcgccccacaatatcacctacggcattctagtcgactgctgcagccgtgctggccgcttggaccttggcttcgctgccatgggccacatcgttaagacgggatttgcggcaggatccgttgtctctttcagccacctgctcagggccgtctgtgcggagaagaagaccagctacggaatggacatcgtgctccgaattatgcctgagcttaactgcataccggatgtttactcctacagcattcttttcaagggcctctgcaacgagaagagaagccaagaggttctcgagctgattcacgtgatggttgagcacggaggtagctgccaacctaatctggtctcatacaacaccgtaattgatggcttgttgaaagagggtgaggtgggcaaggcttacagcctattttgtgaaatggtacagagcgggattttggcaaatattgtgacctacaactcaatcatctctggcatgtgcaaggttcatgcaatggacaaggctgagaaggttcttcaacagatgtttgatagagaaattctgccagatactgccacatatactagcctaatacatggatgttattcatcaggacaatgcaaagaggtggaacgggttttcgagcacatgtctataaatggtgttcaaccaaatatgataacttacaatgtacagatggattatctttgcaagagcggaagatgcgcggaagctaggaagatctttgattctatggtcagtttgggccaaaaaccgtctgttactacctacagtattctgcttcatggttatgttatggaaaaatcatttcatgatatgcattgtctccttgatttgatggtagaaaatggtatctcaccagatcatcatgtctacaacatactcatatctgcatatgctaaagaggaaatggcaagtgaggtaatgcatatatttacaaaaatgcggcagcaaggattgaaccctagtgttgcggactatggagcggtaataaacttgctttccagtattggcagaatggatgatgctatgtcccaattcaatcaaatgatagccgaaggattagctcctgatatcatagttttcaacccccttattagtggtttttgtacttgtggcaaatgggagaaggttcatgaactattttctgaaatgttgaatcgcggcacctatcctgataccgtgttcttcaccacaattatggaccgcctttgcaaaaatggaagggttatggaagcccaagatatgtttgacctgatggtacacgtgggtgttaagcctaatgttcatacttatgccacattgatgcatgggtactttttcgttaggaagatggatgaagtgaggaagttacttggcaatatgctctcaattggctcgaaaccggat

SEQ ID NO: 2172 - DNA, 1779 bp, Triticum aestivum; identical to SEQ ID NO: 2165

SEQ ID NO: 2173 - DNA, 573 bp, Triticum aestivum
atgcattgtctccttgatttgatggtagaaaatggtatctccccagatcatcatgtctacaacatactcatatctgcatatgctaaagaggaaatggcaagtgaggtaatgcatatatttacaaaaatacggcagcaaggattgaaccctagtgttgcggactatggagcggtaataaacttgctttccagtattggcagaatggatgatgctatgtcccaattcaatcaaatgatagccgaaggattagctcctgatatcatagttttcaacccccttattagtggtttttgtacttgtggcaaatgggagaaggttcatgaactattttctgaaatgttgaatcgcggcacctatcctgataccgtgttcttcaccacaattatggaccgcctttgcaaaaatggaagggttatggaagcccaagatatgtttgacctgatggtacacgtgggtgttaagcctaatgttcatacttatgccacattgatgcatgggtactttttcgttaggaagatggatgaagtgaggaagttacttggcaatatgctctcaattggctcgaaaccggat

SEQ ID NO: 2174 - DNA, 735 bp, Triticum aestivum
atgataacttacaatatacagatggattatctttgcaagagcggaagatgcgcggaagctaggaagatctttgattctatggtcagtttgggccaaaaaccgtytgttactacctacagtattctgcttcatggttatgttatggaaaaatcatttcatgatatgcattgtctccttgatttgatggtagaaaatggtatctcaccagatcatcatgtctacaacatactcatatctgcatatgctaaagaggaaatggcaagtgaggtaatgcatatatttacaaaaatgcggcagcaaggattgaaccctagtgttgcggactatggagcggtaataaacttgcattccagtattggcagaatggatgatgctatgccccaattcaatcaaatgatagccgaaggattagctcctgatatcatagttttcaacccccttattagtggtttttgtacttgtggcaaatgggagaaggttcatgaactattttctgaaatgttgaatcgcggcacctatcctgataccgtgttcttcaccacaattatggaccgcctttgcaaaaatggaagggttatggaagcccaagatatgtttgacctgatggtacacgtgggtgttaagcctaatgttcatacttatgccacattgatgcatgggtactttttcgttaggaagatggatgaagtgaggaagttacttggcaatatgctctcaattggctcgaaaccggat

SEQ ID NO: 2175 - DNA, 1779 bp, Triticum aestivum
atggtgagcatcggtgagcatgctcgtcctcctaactctgctttccttcttcctaatcccagttcatgcccaggttgcgccggtgcggtggggggcgagcggcgccggcgtcctctgggtcctctgccattaccagattcttccagatccataggtggagctatgagccgccgcgccgtccccgctggcaggcgcatcttggagcagaacatcaaggcccggtaccgggctggagccattggcaccgacgatgcactccacctgtttgacgaattgctccaggttgcctggccctcctcgatcgccgccatcaactgcctcctcattgtcgtcggccgtgattgccctgcgctcgccgtctccctcttcaaccacatcgcaagagccaaggtggcgccccacaatatcacctacggcattctagtcgactgctgcagccgagctggccgcttggaccttggcttcgcggccatgggccacattgttaagacgggatttgcggtaggatccattgtctctttcagccacctgctcagggccgtctgtgcgaagaagaagaccagctacggaatggacatcgtgctccgaattatgcctgagcttaactgcataccggatgtttactcctacagcattcttttcaagggcctctgcaacgagaagagaagccaagaggctctcgagctgattcacgtgatggttgagcacggaggtagctgccaacctaatctggtctcatacaacaccgtaattgatggcttgttgaaagagggtgaggtgggcaaggcttacatcctattttgtgaaatggtacagagcgggattttggcaaatattgtgacctacaactcaatcatctctggcatgtgcaaggttcatgcaatggacaaggctgagaaggttcttcaacagatgtttgatagagaaattctgccagatactgccacatatactagcctaatacatggatattattcatcaggacaatgcaaagaggtggaacgggttttcgagcacatgtctataaatggtgttcaaccaaatatgataacttacaatatacagatggattatctttgcaagagcggaagatgcgcggaagctaggaagatctttgattctatggtcagtttgggccaaaaaccgtctgttactacctacagtattctgcttcatggttatgttatggaaaaatcatttcatgatatgcattgtctccttgatttgatggtagaaaatggtatctcaccagatcatcatgtctacaacatactcatatctgcatatgctaaagaggaaatggcaagtgaggtaatgcatatatttacaaaaatgcggcagcaaggattgaaccctagtgttgcggactatggagcggtaataaacttgctttccagtattggcagaatggatgatgctatgtcccaattcaatcaaatgatagccgaaggattagctcctgatatcatagttttcaacccccttattagtggtttttgtacttgtggcaaatgggagaaggttcatgaactattttctgaaatgttgaatcgcggcacctatcctgataccgtgttcttcaccacaattatggaccgcctttgcaaaaatggaagggttatggaagcccaagatatgtttgacctgatggtacacgtgggtgttaagcctaatgttcatacttatgccacattgatgcatgggtactttttcgttaggaagatggatgaagtgaggaagttacttggcaatatgctctcaattggctcgaaaccggat

SEQ ID NO: 2176 - DNA, 1344 bp, Triticum aestivum
  misc_feature (1306)..(1306): n is a, c, g, or t
atgggccacatcgttaagacgggatttgcggcaggatccgttgtctctttcagccacctgctcagggccgtctgtgcggagaagaagaccagctacggaatggacatcgtgctccgaattatgcctgagcttaactgcataccggatgtttactcctacagcattcttttcaagggcctctgcaacgagaagagaagccaagaggttctcgagctgattcacgtgatggttgagcacggaggtagctgccaacctaatctggtctcatacaacaccgtaattgatggcttgttgaaagagggtgaggtgggcaaggcttacagcctattttgtgaaatggtacagagcgggattttggcaaatattgtgacctacaactcaatcatctctggcatgtgcaaggttcatgcaatggacaaggctgagaaggttcttcaacagatgtttgatagagaaattctgccagatactgccacatatactagcctaatacatggatgttattcatcaggacaatgcaaagaggtggaacgggttttcgagcacatgtctataaatggtgttcaaccaaatatgataacttacaatgtacagatggattatctttgcaagagcggaagatgcgcggaagctaggaagatctttgattctatggtcagtttgggccaaaaaccgtctgttactacctacagtattctgcttcatggttatgttatggaaaaatcatttcatgatatgcattgtctccttgatttgatggtagaaaatggtatctcaccagatcatcatgtctacaacatactcatatctgcatatgctaaagaggaaatggcaagtgaggtaatgcatatatttacaaaaatgcggcagcaaggattgaaccctagtgttgcggactatggagcggtaataaacttgctttccagtattggcagaatggatgatgctatgtcccaattcaatcaaatgatagccgaaggattagctcctgatatcatagttttcaacccccttattagtggtttttgtacttgtggcaaatgggagaaggttcatgaactattttctgaaatgttgaatcgcggcacctatcctgataccgtgttcttcaccacaattatggaccgcctttgcaaaaatggaagggttatggaagcccaagatatgtttgacctgatggtacacgtgggtgttaagcctaatgttcatacttatgccacattgatgcatgggtactttttcgttaggaagatggatgaagtgaggaagttacttggcaatrtgctctcaattggctcgaaaccgngattaggagtgctctgcttcaaggttagtgccaggcca

SEQ ID NO: 2177 - DNA, 1779 bp, Triticum aestivum
atggtgagcatcggcgagcatgctcgtcctcctaactctgctttccttcttcctaatcccagttcatgcccaggttgcgccggtgcggtggggggcgagcggcgccggcgtcctctgggtcctctgccactaccagattcttccagatccataggtggagctatgagccgccgcgccgtccccgctggcaggcgcatcttggagcagaacatcaaggcccggtaccgggctggagccattggcaccgacgatgcactccacctgtttgacgaattgctccaggttgcctggccctcctcgatcgccgccatcaactgcctcctcattgtcgtcggccgtgattgccctgcgctcgccgtctccctcttcaaccacatcgcaagagccaaggtggcgccccacaatatcacctacggcattctagtcgactgctgcagccgtgctggccgcttggaccttggcttcgctgccatgggccacatcgttaagacgggatttgcggcaggatccgttgtctctttcagccacctgctcagggccgtctgtgcggagaagaagaccagctacggaatggacatcgtgctccgaattatgcctgagcttaactgcataccggatgtttactcctacagcattcttttcaagggcctctgcaacgagaagagaagccaagaggttctcgagctgattcacgtgatggttgagcacggaggtagctgccaacctaatctggtctcatacaacaccgtaattgatggcttgttgaaagagggtgaggtgggcaaggcttacagcctattttgtgaaatggtacagagcgggattttggcaaatattgtgacctacaactcaatcatctctggcatgtgcaaggttcatgcaatggacaaggctgagaaggttcttcaacagatgtttgatagagaaattctgccagatactgccacatatactagcctaatacatggatgttattcatcaggacaatgcaaagaggtggaacgggttttcgagcacatgtctataaatggtgttcaaccaaatatgataacttacaatgtacagatggattatctttgcaagagcggaagatgcgcggaagctaggaagatctttgattctatggtcagtttgggccaaaaaccgtctgttactacctacagtattctgcttcatggttatgttatggaaaaatcatttcatgatatgcattgtctccttgatttgatggtagaaaatggtatctcaccagatcatcatgtctacaacatactcatatctgcatatgctaaagaggaaatggcaagtgaggtaatgcatatatttacaaaaatgcggcagcaaggattgaaccctagtgttgcggactatggagcggtaataaacttgatttccagtattggcagaatggatgatgctatgtcccaattcaatcaaatgatagccgaaggattagctcctgatatcatagttttcaacccccttattagtggtttttgtacttgtggcaaatgggagaaggttcatgaactattttctgaaatgttgaatcgcggcacctatcctgataccgtgttcttcaccacaattatggaccgcctttgcaaaaatggaagggttatggaagcccaagatatgtttgacctgatggtacacgtgggtgttaagcctaatgttcatacttatgccacattgatgcatgggtactttttcgttaggaagatggatgaagtgaggaagttacttggcaatatgctctcaattggctcgaaaccggat

SEQ ID NO: 2178 - DNA, 762 bp, Triticum aestivum
atgtctataaatggtgttcaaccaaatatgataacttacaatatacagatggattatctttgcaagagcggaagatgcgcggaagctaggaagatctttgattctatggtcagtttgggccaaaaaccgtctgttactacctacagtattctgcttcatggttatgttatggaaaaatcatttcatgatatgcattgtctccttgatttgatggtagaaaatggtatctcaccagatcatcatgtctacaacatactcatatctgcatatgctaaagaggaaatggcaagtgaggtaatgcatatatttacaaaaatgtggcagcaaggattgaaccctagtgttgcggactatggagcggtaataaacttgctttccagtattggcagaatggatgatgctatgtcccaattcaatcaaatgatagccgaaggattagctcctgatatcatagttttcaacccccttattagtggtttttgtacttgtggcaaatgggagaaggttcatgaactattttctgaaatgttgaatcgcggcacctatcctgataccgtgttcttcaccacaattatggaccgcctttgcaaaaatggaagggttatggaagcccaagatatgtttgacctgatggtacacgtgggtgttaagcctaatgttcatacttatgccacattgatgcatgggtactttttcgttaggaagatggatgaagtgaggaagttacttggcaatatgctctcaattggctcgaaaccggat

SEQ ID NO: 2179 - DNA, 1779 bp, Triticum aestivum
atggtgagcatcggcgagcatgctcgtcctcctaactctgctttccttcttcctaatcccagttcatgcccaggttgcgccagtgcggtggggggcgagcggcgccggcgtcctctgggtcctctgccattaccagattcttccagatccataggtggatctatgagccgccgcgccgtccccgctggcaggcgcatcttggagcagaacatcaaggcccggtaccgggctggagccattggcaccgacgatgcacaccacctgtttgacgaattgctccaggttgcctggccctcctcaatcgccaccatcaactgcctcctcattgtcgtcggccgtgattgccctgcgctcgccatctccctcttcaaccacatcgcaagagccaaggtggcgccccacaatatcacctatggcattctagtcgactgctgcagccgtgctggccgcttggaccttggcttcactgccatgggccacattgttaagacgggatttgcggcaggatccgttgtctctttcagccacctgctcagggccgtctgtgcggagaagaagaccagctacggaatggacatcgtgctccgaattatgcctgagcttaactgcataccggatgtttactcctacagcactcttttcaagggcctctgcaacgagaagagaagccaagaggctctcgagctgattcacgtgatggttgagcacggaggtagctgccaacctaatctggtctcatacaacaccgtaattgatggcttgttgaaagagggtgaggtgggcaaggcttacagcctattttgtgaaatggtacagagcgggattttggcaaatattgtgacctacaactcaatcatctttgacatgtgcaaggttcatgcaatggacaaggctgagaaggttcttcaacagatgtttgatagagaaattctgccagatactgccacatatactagcctaatacatggatattattcatcaggacaatgcaaagaggtggaacgggttttcgagcacatgtctataaatggtgttcaaccaaatatgataacttacaatatacagatggattatctttgcaagagcggaagatgcgcggaagctaggaagatctttgattctatggtcagtttgggccaaaaaccgtctgttactacctacagtattctgcttcatggttatgttatggaaaaatcatttcatgatatgcattgtctccttgatttgatggtagaaaatggtatctcaccagatcatcatgtctacaacatactcatatctgcatatgctaaagaggaaatggcaagtgaggtaatgcatatatttacaaaaatgcggcagcaaggattgaaccctagtgttgcggactatggagcggtaataaacttgctttccagtattggcagaatggatgatgctatgtcccaattcaatcaaatgatagccgaaggattagctcctgatatcatagttttcaacccccttattagtggtttttgtacttgtggcaaatgggagaaggttcatgaactattttctgaaatgttgaatcgcggcacctatcctgataccgtgttcttcaccacaattatggaccgcctttgcaaaaatggaagggttatggaagcccaagatatgtttgacctgatggtacacgtgggtgttaagcctaatgttcatacttatgccacattgatgcatgggtactttttcgttaggaagatggatgaagtgaggaagttacttggcaatatgctctcaattggctcgaaaccggat

SEQ ID NO: 2180 - DNA, 1779 bp, Triticum aestivum
atggtgagcatcggcgagcatgctcgtcctcctaactctgctttccttctacctaatcccagttcatgcccaggttgcgccggtgcggtggggggcgagcggcgccggcgtcctctgggtcctctgccattaccagattcttccagatccataggtggagctatgagccgccgcgccgtccccgctggcaggcgcatcttggagcagaacatcaaggcccggtaccgggctggagccattggcaccgacgatgcactccacctgtttgacgaattgctccaggttgcctggccctcctcaatcgccgccatcaactgcctcctcattgtcgtcggccgtgattgccctgcgctcgtcgtctccctcttcaaccacatcgcaagagccaaggtggcgccccacaatatcacctacgtcattctagtcgactgctgcagccgtgctggccgcttggaccttggcttcgctgccatgggccacattgttaagacgggatttgcggcaggatctgttgtctctttcagccacctgctcagggccgtctgtgcggagaagaagaccagctacggaatggacatcgtgctccgaattatgcctgagcttaactgcataccggatgtttactcctacagcattcttttcaagggcctctgcaacgagaagagaagccaagaggctctcgagctgattcacgtgatggttgagcacggaggtagctgccaacctaatctggtctcatataacaccgtaattgatggcttgttgaaagagggtgaggtgggcaaggcttacagcctattttgtgaaatggtacagagcgggattttggcaaatattgtgacctacaactcaatcatctttggcatgtgcaaggttcatgcaatggacaaggctgagaaggttcttcaacagatgtttgatagagaaattctgccagatactgccacatatactagcctaatacatggatattattcatcaggacaatgcaaagaggtggaacgggttttcgagcacatgtctataaatggtgttcaaccaaatatgataacttacaatatacagatggattatctttgcaagagcggaagatgcgcggaagctaggaagatctttgattctatggtcagtttgggccaaaaaccgtctgttactacctacagtattctgcttcatggttatgttatggaaaaatcatttcatgatatgcattgtctccttgatttgatggtagaaaatggtatctcaccagatcatcatgtctacaacatactcatatctgcatatgctaaagaggaaatggcaagtgaggtaatgcatatatttacaaaaatgtggcagcaaggattgaaccctagtgttgcggactatggagcggtaataaacttgctttccagtattggcagaatggatgatgctatgtcccaattcaatcaaatgatagccgaaggattagctcctgatatcatagttttcaacccccttattagtggtttttgtacttgtggcaaatgggagaaggttcatgaactattttctgaaatgttgaatcgcggcacctatcctgataccgtgttcttcaccacaattatggaccgcctttgcaaaaatggaagggttatggaagcccaagatatgtttgacctgatggtacacgtgggtgttaagcctaatgttcatacttatgccacattgatgcatgggtactttttcgttaggaagatggatgaagtgaggaagttacttggcaatatgctctcaattggctcgaaaccggat

SEQ ID NO: 2181 - DNA, 1779 bp, Triticum aestivum; identical to SEQ ID NO: 2168

SEQ ID NO: 2182 - DNA, 1779 bp, Triticum aestivum
atggtgagcatcggcgagcatgctcgtcctcctaactctgctttccttcttcctaatcccagttcatgcccaggttgcgtcggtgcggtggggggcgagcggcatcggcgtcctctgggtcctctgccattaccagattcttccagatccataggtggagctatgagccgccgcgccgtccccgctggcaggcgcatcttggagcagaacatcaaggcccggtaccgggctggagccattggcaccgacgatgcactccacctatttgacgaattgctccaggttgcctggccctcctcgatcgccgccatcaactgcctcctcattgtcgtcggccgtgattgccctgcgctcgccgtctccctcttcaaccacatcgcaagagccaaggtggcgccccacaatatcacctacggcattctagtcgactgctgcagccatgctggccgcttggaccttggcttcgctgccatgggccacatcgttaagacggtatttgcgacaggatccattgtctctttcagccacctgctcagggccgtctgtgcggagaagaagaccagctacggaatggacatcgtgctccgaattatgcctgagcttaactgcataccggatgtttactcctacagcatgcttttcaagggcctctgcaacgagaagagaagccaagaggctctcgagctgattcacgtgatggttgagcacggaggtagctgccaacctaatctggtctcatacaacgccataattgatggcttgttgaaagagggtgaggtgggcaaggcttacagcctattttgtgaaatggtacagagcgggattttggcaaatattgtgacctacaactcaatcatctctggcatgtgcaaggttcatgcaatggacaaggctgagaaggttcttcaacagatgtttgatagagaaattctgccagatactgccacatatactagcctaatacatggatgttattcatcaggacaatgcaaagaggtggaacgggttttcgagcacatgtctataaatggtgttcaaccaaatatgataacttacaatatacagatggattatctttgcaagagcggaagatgcacggaagctaggaagatctttgattctatggtcagtttgggccaaaaaccgtctgttactacctacagtattctgcttcatggttatgttatggaaaaatcatttcatgatatgcattgtctccttgatttgatggtagaaaatggtatctcaccagatcatcatgtctacaacatactcatatctgcatatgctaaagaggaaatggcaagtgaggtaatgcatatatttacaaaaatgcggcggcaaggattgaaccctagtgttgcggactatggagcggtaataaacttgctttccagtattggcagaatggatgatgctatgccccaattcaatcaaatgatagccgaagtattagctcctgatatcatagttttcaacccccttattagtggtttttgtacttgtggcaaatgggagaaggttcatgaactattttctgaaatgttgaatcgcggcacctatcctgataccgtgttcttcaccacaattatggaccgcctttgcaaaaatggaagggttatggaagcccaagatatgtttgacctgatggtacacgtgggtgttaagcctaatgttcatacttatgccacattgatgcatgggtactttttcgttaggaagatggatgaagtgaggaagttacttggcaatatgctctcaattggctcgaaaccggat

SEQ ID NO: 2183 - DNA, 1779 bp, Triticum aestivum; identical to SEQ ID NO: 2160

SEQ ID NO: 2184 - DNA, 1779 bp, Triticum aestivum
atggtgagcatcggcgagcatgctcgtcctcctaactctgctttccttcttcctaatcccagttcatgcccaggttgcgtcggtgcggtggggggcgagcggcaccggcgtcctctaggtcctctgccattaccagattcttccagatccataggtggagctatgagccgccgcgccgtccccgctggcaggcgcatcttggagcagaacatcaaggcccggtaccgggctggagccattggcaccgacgatgcactccacctgtttgacgaattgctccaggttgcctggccctcctcgatcgccaccatcaactgcctcctcattgtcgtcggccgtgattgccctgcgctcgccgtctccctcttcaaccacatcgcaagagccaaggtggcgccccacaatatcacctacggcattctagtcgactgctgcagccgtgctggccgcttggaccttggcttcgctgccatgggccacatcgttaagacgggatttgcggcaggatccgttatctctttcagccacctgctcagggccgtctgtgcggagaagaagaccagctacggaatggacatcgtgctccgaattatgcctgagcttaactgcataccggatgtttactcctacagcattcttttcaagggcctctgcaacgagaagagaagccaagaggctctcgagctgattcacgtgatggttgagcacggaggtagctgccaacctaatctggtctcatacaacaccgtaattgatggcttgttgaaagagggtgaggtgggcaaggcttacagcctattttgtgaaatggtacagagcgggattttggcaaatattgtgacctacaactcaatcatctctggcatgtgcaaggttcatgcaatggacaaggctgagaaggttcttcaacagatgtttgatagagaaattctaccagatactgccacatatactagcctaatacatggatattattcatcaggacaatgcaaagaggtggaacgggttttcgagcacatgtctataaatggtgttcaaccaaatatgataacttacaatatacagatggattatctttgcaagagcggaagatgcgcggaagctaggaagatctttgattctatggtcagtttgggccaaaaaccgtctgttactacctacagtattctgcttcatggttatgttatggaaaaatcatttcatgatatgcattgtctccttgattttatggtagaaaatggtatctcaccagatcatcatgtctacaacatactcatatctgcatatgctaaagaggaaatggcaagtgaggtaatgcatatatttacaaaaatgcggcagcaaggattgaaccctagtgttgcggactatggagcggtaataaacttgctttccagtattggcagaatggatgatgctatgtcccaattcaatcaaatgatagccgaaggattagctcctgatatcatagttttcaacccccttattagtggtttttgtacttgtggcaaatgggagaaggttcatgaactattttctgaaatgttgaatcgcggcacctatcatgataccgtgttcttcaccacaattatggaccgcctttgcaaaaatggaagggttatggaatcccaagatatgtttgacctgatggtacacgtgggtgttaagcctaatgttcatacttatgccacattgatgcatgggtactttttcgttaggaagatggatgaagtgaggaagttagttggcaatatgctctcaattggctcgaaaccggat

SEQ ID NO: 2185 - DNA, 1779 bp, Triticum aestivum; identical to SEQ ID NO: 2160

SEQ ID NO: 2186 - DNA, 1779 bp, Triticum aestivum
atggtgagcatcggcgagcatgctcgtcctcctaactctgctttccttcttcctaatcccagttcatgcccaggttgcgtcggtgcggtggggggcgagcggcaccggcgtcctctaggtcctctgccattaccagattcttccagatccataggtggagctatgagccgccgcgccgtccccgctggcaggcgcatcttggagcagaacatcaaggcccggtaccgggctagagccattggcaccgacgatgcactccacctgtttgacgaattgctccaggttgcctggccctcctcgatcgccgccatcaactgcctcctcattgtcgtcggccgtgattgccctgcgctcgccgtctccctcttcaaccacatcgcaagagccaaggtggcgccccacaatatcacctacggcattctagtcgactgctgcagccgtgctggccgcttggaccttggcttcgctgccatgggccacatcgttaagacgggatttgcggcaggatccgttatctctttcagccacctgctcagggccgtctgtgcggagaagaagaccagctacggaatggacatcgtgctccgaattatgcctgagcttaactgcataccggatgtttactcctacagcattcttttcaagggcctctgcaacgagaagagaagccaagaggctctcgagctgattcacgtgatggttgagcacggaggtagctgccaacctaatctggtctcatacaacaccgtaattgatggcttgttgaaagagggtgaggtgggcaaggcttacagcctattttgtgaaatggtacagagcgggattttggcaaatattgtgacctacaactcaatcatctctggcatgtgcaaggttcatgcaatggacaaggctgagaaggttcttcaacagatgtttgatagagaaattctaccagatactgccacatatactagcctaatacatggatattattcatcaggacaatgcaaagaggtggaacgggttttcgagcacatgtctataaatggtgttcaaccaaatatgataacttacaatatacagatggattatctttgcaagagcggaagatgcgcggaagctaggaagatctttgattctatggtcagtttgggccaaaaaccgtctgttactacctacagtattctgcttcatggttatgttatggaaaaatcatttcatgatatgcattgtctccttgattttatggtagaaaatggtatctcaccagatcatcatgtctacaacatactcatatctgcatatgctaaagaggaaatggcaagtgaggtaatgcatatatttacaaaaatgcggcagcaaggattgaaccctagtgttgcggactatggagcggtaataaacttgctttccagtattggcagaatggatgatgctatgtcccaattcaatcaaatgatagccgaaggattagctcctgatatcatagttttcaacccccttattagtggtttttgtacttgtggcaaatgggagaaggttcatgaactattttctgaaatgttgaatcgcggcacctatcmtgataccgtgttcttcaccacaattatggaccgcctttgcaaaaatggaagggttatggaagcccaagatatgtttgacctgatggtacacgtgggtgttaagcctaatgttcatacttatgccacattgatgcatgggtactttttcgttaggaagatggatgaagtgaggaagttacttggcaatatgctctcaattggctcgaaaccggat

SEQ ID NO: 2187 - DNA, 1551 bp, Triticum aestivum
atgcgcccatgccggacgcctctcctcgactccacctcgccgctgtccgtgctcctcctcgaccacctccaccgcaatcgcccctcccctcccccctcagcctcgccgccgtcagccttctggtctcccatcgccgcattcgccgctgccacaaagcgcgcccgagccgggacgctcagccctgaggacgcacaccacctgttcgacgaattgctacgccagtccaacccggtccccaatcgcttcctgaacagcttccttgccgccctcgcccgtgctccaccctccgacgcctgcggagatggccccgccctcaccgtcgccctcttcaaccgcctgtgccgagaagaggccggcccttgtgtagcgccgcccactatctatacctacagcattctaatggacagctgctgccgcgtgggtcgcccggaccttgggcttgctgtcttcggccgcctactcaagtcgggcttcaaggcagaccagagcactgccagcagcctcctcatgtgcctctgcgatgtaggacggacaaacgaggctgtggacgtgctgcttcataggatctccgagctcggctgtgagcctaatgtcatcccatacaacatagttcttaagagcttatgtgacagtagaaggagccagcaagctcttgacctgctccagatgatggcacaaagaggttgctgctcccctaatgtggtgtcatataacaccgtcattcatggcttatttaaggaaggtgaagtaagcatggcgtgctcattattctatgaaatgatgcggcaaagggttatgcctaatgtggtgacatatagatcgatgattggtgcgttgtgcaaggtcggggcaacggacaaggcaaagctggtccttggtcatatggttggtaatggttttcgaccagataagtatatttggaactcattcatggcatctctttgcaagcagggaagaagcaaggaagctgcacaactttttgattacatggtcgccaagggccacaaacctgatgttgtcacgtactctactctgcttcatgggtatgctactgaaggatgcttcactgatatgattaatctctttaattcaatggaaggcaacggtattgtagctaacagctgtgtttttaacatactaattgacgcatatgctaaacgtggaatgatgcatgaagctatgctcatatttactgaaatgcgggaacgaagagtgagtcctgatatattcacctatggaattataatagctgcactttgcagaatgggtaggctatctgatgctatggagaaaataaatgaaatggttgctacaggattacaaccggacaaggctgtttactattccctaattcagggtttttgtacacatgatgatttggtcaaagctaaggagttggtttctgagatgatgaccaaaggtattcctcgtcctaacattgtgttcttcaactcggtaatagccagtctgtgcaaagaaggaagggttaaggatgcacacggtatctttgacttggctctgaacattggtgagaggcccgatttaattcac

SEQ ID NO: 2188 - DNA, 1551 bp, Triticum aestivum; identical to SEQ ID NO: 2187

SEQ ID NO: 2189 - DNA, 1551 bp, Triticum aestivum; identical to SEQ ID NO: 2187

SEQ ID NO: 2190 - DNA, 1551 bp, Triticum aestivum; identical to SEQ ID NO: 2187

SEQ ID NO: 2191 - DNA, 1551 bp, Triticum aestivum; identical to SEQ ID NO: 2187

SEQ ID NO: 2192 - DNA, 1551 bp, Triticum aestivum; identical to SEQ ID NO: 2187

SEQ ID NO: 2193 - DNA, 1779 bp, Triticum aestivum
atggtgagcatcggcgagcatgctcgtcctcctaactctgctttccttcttcctaatcccagttcatgcccaggttgcgccagtgcggtggggggcgagcggcgccggcgtcctctgggtcctctgccattaccagattcttccagatccataggtggatctatgagccgccgcgccgtccccgctggcaggcgcatcttggagcagaacatcaaggcccggtaccgggctggagccattggcaccgacgatgcacaccacctgtttgacgaattgctccaggttgcctggccctcctcaatcgccaccatcaactgcctcctcattgtcgtcggccgtgattgccctgcgctcgccatctccctcttcaaccacatcgcaagagccaaggtggcgccccacaatatcacctatggcattctagtcgactgctgcagccgtgctggccgcttggaccttggcttcactgccatgggccacattgttaagacgggatttgcggcaggatccgttgtctctttcagccacctgctcagggccgtctgtgcggagaagaagaccagctacggaatggacatcgtgctccgaattatgcctgagcttaactgcataccggatgtttactcctacagcactcttttcaagggcctctgcaacgagaagagaagccaagaggctctcgagctgattcacgtgatggttgagcacggaggtagctgccaacctaatctggtctcatacaacaccgtaattgatggcttgttgaaagagggtgaggtgggcaaggcttacagcctattttgtgaaatggtacagagcgggattttggcaaatattgtgacctacaactcaatcatctttgacatgtgcaaggttcatgcaatggacaaggctgagaaggttcttcaacagatgtttgatagagaaattctgccagatactgccacatatactagcctaatacatggatattattcatcaggacaatgcaaagaggtggaacgggttttcgagcacatgtctataaatggtgttcaaccaaatatgataacttacaatatacagatggattatctttgcaagagcggaagatgcgcggaagctaggaagatctttgattctatggtcagtttgggccaaaaaccgtctgttactacctacagtattctgcttcatggttatgttatggaaaaatcatttcatgatatgcattgtctccttgatttgatggtagaaaatggtatctcaccagatcatcatgtctacaacatactcatatctgcatatgctaaagaggaaatggcaagtgaggtaatgcatatatttacaaaaatgcggcagcaaggattgaaccctagtgttgcggactatggagcggtaataaacttgctttccagtattggcagaatggatgatgctatgtcccaattcaatcaaatgatagccgaaggattagctcctaatatcatagttttcaacccccttattagtggtttttgtacttgtggcaaatgggagaaggttcatgaactattttctgaaatgttgaatcgcggcacctatcctgataccgtgttcttcaccacaattatggaccgcctttgcaaaaatggaagggttatggaagcccaagatatgtttgacctgatggtacacatgggtgttaagcctaatgttcatacttatgccacattgatgcatcggtactttttcgttaggaagatggatgaagtgaggaagttacttggcaatatgctctcaattggctcgaaaccggat

SEQ ID NO: 2194 - DNA, 1308 bp, Triticum aestivum
atgggccacatcgttaagacgggatttgcggcaggatccgttgtctctttcagccacctgctcagggccgtctgtgcggagaagaagaccagctacggaatggacatcgtgctccgaattatgcctgagcttaactgcataccggatgtttactcctacaacattcttttcaagggcctctgcaacgagaagagaagccaagaggctctcgagctgattcacgtgatggttgagcacggaggtagctgccaacctaatctggtctcatacaacaccgtaattgatggcttgttgaaagagggtgaggtgggcaaggcttacagcctattttgtgaaatggtacagagcgggattttggcaaatattgtgacctacaactcaatcatctctggcatgtgcaaggttcatgcaatggacaaggctgagaaggttcttcaacagatgtttgatagagaaattctgccagatactgccacatatactagcctaatacatggatattattcatcaggacaatgcaaagaggtggaacgggttttcgagcacatgtctataaatggtgttcaaccaaatatgataacttacaatatacagatggattatctttgcaagagcggaagatgcgcggaagctaggaagatctttgattctatggtcagtttgggccaaaaaccgtctgttactacatacagtattctgcttcatggttatgttatggaaaaatcatttcatgatatgcattgtctccttgatttgatggtagaaaatggtatctccccagatcatcatgtctacaacatactcatatctgcatatgctaaagaggaaatggcaagtgaggtaatgcatatatttacaaaaatacggcagcaaggattgaaccctagtgttgcggactatggagcggtaataaacttgctttccagtattggcagaatggatgatgctatgtcccaattcaatcaaatgatagccgaaggattagctcctgatatcatagttttcaacccccttattagtggtttttgtacttgtggcaaatgggagaaggttcatgaactattttctgaaatgttgaatcgcggcacctatcctgataccgtgttcttcaccacaattatggaccgcctttgcaaaaatggaagggttatggaagcccaagatatgtttgacctgatggtacacgtgggtgttaagcctaatgttcatacttatgccacattgatgcatgggtactttttcgttaggaagatggatgaagtgaggaagttacttggcaatatgctctcaattggctcgaaaccggat

SEQ ID NO: 2195 - DNA, 1770 bp, Triticum aestivum
atggtgagcatcggcgagcatgctcgtcctcctaactctactttccttcttcctaatcccagttcatgcccaggttgcgccggtgcggtggggggcgagcggcaccggcgtcctctgggtcctctgccattaccagattcttccagatccataggtggagctatgagccgccgcgccgtccccgctggcaggcgcatcttggagcagaacatcaaggcccggtaccgggctggagccattggcaccgacgatgcactccacctgtttgacgaattgctccaggttgcctggccctcctcgatcgccgccatcaactgcctcctcattgtcgtcggccgtgattgccctgcgctcgccgtctccctcttcaaccacatcgcaagagccaaggtggcgccccacaatatcacctacggcattctagtcgactgctgcagccgtgctggccgcttggaccttggcttcgctgccatgggccacatcgttaagacgggatttgcggcaggatccgttgtctcttttagccacctgctcagggccgtctgtgcggagaagaagaccagctacggaatggacatcgtgctccgaattatgcctgagcttaactgcataccggatgtttactcctacagcattcttttcaagggcctctgcaacgagaagagaagccaagaggctctcgagctgattcacgtgatggttgagcacggaggtagctgccaacctaatctggtctcatacaacaccgtaattgatggcttgttgaaagagggtgaggtgggcaaggcttacagcctattttgtgaaatggtacagagcgggattttggcaaatattgtgacctacaactcaatcatctctggcatgtgcaaggttcatgcaatggacaaggctgagaaggttcttcaacagatgtttgatagagaaattctgccagatactgccacatatactagcctaatacatggatattattcatcaggacaatgcaaagaggtggaacgggttttcgagcacatgtctataaatggtgttcaaccaaatatgataacttacaatatacagatggattatctttgcaagagcggaagatgcgcggaagctaggaagatctttgattctatggtcagtttgggccaaaaaccgtttgttactacatacagtattctgcttcatggttatgttatggaaaaatcatttcatgatatgcattgtctccttgatttgatggtagaaaatggtatctcaccagatcatcatgtctacaacatactcatatctgcatatgctaaagaggaaatggcaagtgaggtaatgcatatatttacaaaaatgcggcagcaaggattgaaccctagtgttgcggactatggagcggtaataaacttgctttccagtattggcagaatggatgatgctatgtcccaattcaatcaaatgatagccgaaggattagctcctgatatcatagttttcaacccccttattagtggtttttgtacttgtggcaaatgggagaaggttcatgaactattttctgaaatgttgaatcgcggcacctatcctgataccgtgttcttcaccacaattatggaccgcctttgcaaaaatggaagggttatggaagcccaagatatgtttgacctgatggtacacgtgggtgttaagcctaatgttcatacttatgccacattgatgcatgggtactttttcgttaggaagatggatgaagtgaggaagttacttggcaatawgtcaaagcaacgtttt

SEQ ID NO: 2196 - DNA, 1308 bp, Triticum aestivum
  misc_feature (1289)..(1289): n is a, c, g, or t
atgggccacatcgttaagacgggatttgcggcaggatccgttgtctctttcagccacctgctcagggccgtctgtgcggagaagaagaccagctacggaatggacatcgtgctccgaattatgcctgagcttaactgcataccggatgtttactcctacagcattcttttcaagggcctctgcaacgagaagagaagccaagaggctctcgagctgattcacgtgatggttgagcacggaggtagctgccaacctaatctggtctcatacaacaccgtaattgatggcttgttgaaagagggtgaggtgggcaaggcttacagcctattttgtgaaatggtacagagcgggattttggcaaatattgtgacctacaactcaatcatctctggcatgtgcaaggttcatgcaatggacaaggctgagaaggttcttcaacagatgtttgatagagaaattctgccagatactgccacatatactagcctaatacatggatattattcatcaggacaatgcaaagaggtggaacgggttttcgagcacatgtctataaatggtgttcaaccaaatatgataacttacaatatacagatggattatctttgcaagagcggaagatgcgcggaagctaggaagatctttgattctatggtcagtttgggccaaaaaccgtttgttactacatacagtattctgcttcatggttatgttatggaaaaatcatttcatgatatgcattgtctccttgatttgatggtagaaaatggtatctcaccagatcatcatgtctacaacatactcatatctgcatatgctaaagaggaaatggcaagtgaggtaatgcatatatttacaaaaatgcggcagcaaggattgaaccctagtgttgcggactatggagcggtaataaacttgctttccagtattggcagaatggatgatgctatgtcccaattcaatcaaatgatagccgaaggattagctcctgatatcatagttttcaacccccttattagtggtttttgtacttgtggcaaatgggagaaggttcatgaactattttctgaaatgttgaatcgcggcacctatcctgataccgtgttcttcaccacaattatggaccgcctttgcaaaaatggaagggttatggaagcccaagatatgtttgacctgatggtacacgtgggtgttaagcctaatgttcatacttatgccacattgatgcatgggtactttttcgttaggaagatggatgaagtgaggaagttacttggcaatatgctctnaattggctcgaaaccggat

SEQ ID NO: 2197 - DNA, 1308 bp, Triticum aestivum; identical to SEQ ID NO: 2194

SEQ ID NO: 2198 - DNA, 1308 bp, Triticum aestivum; identical to SEQ ID NO: 2194

SEQ ID NO: 2199 - DNA, 1701 bp, Triticum aestivum
atgagccgccgccttgtccccgtcgacagacgcatcttggagcagaacatcaaggctcggtaccacgccggagacattggcacccaggatgcactccacctgtttgacgaattgctccagtgtgctgggtcctcctcgatccgtgccatcaactatctcgttactactgtcggccgtgattgccctgcgctcggcgtctccctcttcaaccgcgtcgcaagtgccaatgtggcaccaaacagtatcacgtacaccatcctcgtcgactgctgctgccgtgctggccgcttggacctcggtttcgctgccatgggccacatcatcaagatgggatttgcagcagatgctatcgtcactttcagccacctactcaatgccatctgtgcggagaagaagaccagctatgcaatggacatcgtactccgaataatgcccatgtttaactgtgttccgaacattttctcctacagcattcttttcaagggtctctgcaacgagaagagaagccaagaggctctcgagctgattcaggtgatggttgagcatggaggtagctgccaacctaatgtggtgtcctatagcaccgtaattgatggcttgttgaaagagggtttggtgggcaaggcttacagtctattctgtgaaatgctacagaggggaatttcgccaaatgctgtgacctgtagttcaatcatctctggcatgtgcaaggctcaatcaatggacaagtctgaggaggttcttcaacagatgcttgatagacgaattctgccagatgttaccacatataatagtctgatacatggatattattcatcaggaaggtgcaaagaagttgatcggattttccaggaaatgtctagaaatggtgttcaaccaaatattgtaacttacaatatacagatggattatctttgcaagagcggaaggtgcgcagaagctaggaaaatatttgattctatgatcggtctgggccaaaaaccagatgttactacctacagtattctgcttcatgggtctgccatggaaaaatcttttcatgagatgcattgtctcattgatttgatggtgggaaatggtatctcaccagatcatcatgtctacaacatactcatgtctgcatatgctaaagaagaaacggttggtgaggtaatgcatatatttacaaaaatgcggcagcaaggactgaaccctaatgtagcaaactatggagcggcagtaaacttgctttccaagattggccgaatggatgatgctatgtcccaattcaatcaaatgataactgaagggttagctcctgatatcatagttttcaccccccttattagtggtttctgttcttgtggcaaatgggagaaggttgatgaactattttctgagatgttggatcgcggcatatgtcccaacacagtgttcttcaacacaattatggaccgcctttgcaaaaatgaaagggttatggaagcccaagatctcttcgacctgatggtacacatgggtgtgaagcctgatgtgtgtacttatagcacactgataggtggatacttgttcgttggtaagatggatgaagtgagcaagttacttgacaatatggtctcaattggcatggaaccagatgttatcacctataacatactgatgcacctcatatacctcatatatatccatcttgtctgttatgtcccatggacatatctcatt

SEQ ID NO: 2200 - DNA, 1701 bp, Triticum aestivum
atgagccgccgccttgtccccgtcgacagacgcatcttggagcagaacatcaaggctcggtaccacgccggagacattggcacccaggatgcactccacctgtttgacgaattgctccagtgtgctgggtcctcctcgatccgtgccatcaactatctcgttactactgtcggccgtgattgccctgcgctcggcgtctccctcttcaaccgcgtcgcaagtgccaatgtggcaccaaacagtatcacgtacaccatcctcgtcgactgctgctgccgtgctggccgcttggacctcggtttcgctgccatgggccacatcatcaagatgggatttgcagcagatgctatcgtcactttcagccacctactcaatgccatctgtgcggagaagaagaccagctatgcaatggacatcgtactccgaataatgcccatgtttaactgtgttccgaacattttctcctacagcattcttttcaagggtctctgcaacgagaagagaagccaagaggctctcgagctgattcaggtgatggttgagcatggaggtagctgccaacctaatgtggtgtcctatagcaccgtaattgatggcttgttgaaagagggtttggtgggcaaggcttacagtctattctgtgaaatgctacagaggggaatttcgccaaatgctgtgacctgtagttcaatcatctctggcatgtgcaaggctcaatcaatggacaagtctgaggaggttcttcaacagatgcttgatagacgaattctgccagatgttaccacatataatagtctgatacatggatattattcatcaggaaggtgcaaagaagttgatcggattttccaggaaatgtctagaaatggtgttcaaccaaatattgtaacttacaatatacagatggattatctttgcaagagcggaaggtgcgcagaagctaggaaaatatttgattctatgatcggtctgggccaaaaaccagatgttactacctacagtattctgcttcatgggtctgccatggaaaaatcttttcatgagatgcattgtctcattgatttgatggtgggaaatggtatctcaccagatcatcatgtctacaacatactcatatctgcatatgctaaagaagaaacggttggtgaggtaatgcatatatttacaaaaatgcggcagcaaggactgaaccctaatgtagcaaactatggagcggcagtaaacttgctttccaagattggccgaatggatgatgctatgtcccaattcaatcaaatgataactgaagggttagctcctgatatcatagttttcaccccccttattagtggtttctgttcttgtggcaaatgggagaaggttgatgaactattttctgagatgttggatcgcggcatatgtcccaacacagtgttcttcaacacaattatggaccgcctttgcaaaaatgaaagggttatggaagcccaagatctcttcgacctgatggtacacatgggtgtgaagcctgatgtgtgtacttatagcacactgataggtggatacttgttcgttggtaagatggatgaagtgagcaagttacttgacaatatggtctcaattggcatggaaccagatgttatcacctataacatactgatgcacctcatatacctcatatatatccatcttgtctgttatgtcccatggacatatctcatt

SEQ ID NO: 2201 - DNA, 1701 bp, Triticum aestivum; identical to SEQ ID NO: 2200

SEQ ID NO: 2202 - DNA, 1701 bp, Triticum aestivum; identical to SEQ ID NO: 2200

SEQ ID NO: 2203 - DNA, 1701 bp, Triticum aestivum; identical to SEQ ID NO: 2199

SEQ ID NO: 2204 - DNA, 1701 bp, Triticum aestivum; identical to SEQ ID NO: 2199

SEQ ID NO: 2205 - DNA, 1779 bp, Triticum aestivum
atgtcgggcctccgtctccgcccccgccgctcgtcatcttctacctttccgatgccccgctcccgcctccgtcactacgcctccgccatgccgatgtccagcctccgtcccctccaccgcagctcctcctccaccacgtcgcctgcacgcgcctggtccccccatgccgccttcgccgcggccacggagcgtgtccgcgccggggcgctcaggccggaagacgcacacaccctgttcgacgaattgcttcggcaggccacaccggtccccgagcgatccctcaacggcttccttgccgccctcgcccgtgcgcccgcctccggaaactgcatcagagatggccccgcccttgcagtggttctcttcaaccgtgtgtgcagagaggaagccggcccgcaggtggcggcgctcacaggctgcacctacagcatcctcatggactgctactgccgcgcccgtcgcccggacctagggcttgccttatttggccgcttcctcagggaaggcctgaagacacaccagatcgtcgccaacaccttcctcaagtgcctctgctatgcgaaattgacggatgaggcagtggacgtgctgcttcataggatgtccgagttcgggtgtgtgcctgatgccatctcatacaacactgtcctgaagagcttatgcgacaatggcatgagccagcgggggctcgaactgctccagatgattgcaaaagaagtaggtgtctgctctctcaatctggtggcatataacacggtcatctacggcttctttaaggaaggtgaaacaggcaaggcatgcaatctattccatgaaatgatgcagcaaggtgttgagcccgatgtggtgacttacaacttgatcattgatgctttgtgcaaggccagagcaatggacaaggcagaagtagtccttcagcagatgatcagtaaaggtgctcaacctgatacagtgacatataattgcatgatcaatggatatgccacatctgggcggttgaaaaaatctgctaaaatgttcagagaaatgaaaagccggggtcttatgccagatattgttacttgcaactccttcctgtcctccctttgcaagcatggaagaagcaaagaagctagagaaatatttgattccatgaccgccaagggccacaaaccggatatcgtctcataccgtattttgcttcatgggtatgccagtgaaggatgctttgctgatatgattgatctctttaattcaatgaaaagcaatggtattgcagctgactgccgtgttttcaccatattaattggtgcctatgctaaacacggaatgatggatgatgcaatgctcatatttacggaaatgcagcaacaaggtctgagtccaaatgtagtgacatattcaactgtcatatcagcactttctagaatgggtaggttggccaatgctatggagaaatttaatcagatgatttccatgggggttcaaccgaacaaagctgtttatcacaccctaattcagggctcttgtatgcatggtgatttgattaaagccaaggagctggtttctgaaatgatgaacaaaggtattcctcatcctagcattacgttcttcggttcaataataaacagtttatgcaaagatggaagggttatggatgcacatgatatctttgacttggttatagacataggtgagaggcctagtgccattacatttaattcactggttgacggatattgcttagttggcaagatggataaagcatttggaatgcttaatgccatggaatcactggta

SEQ ID NO: 2206 - DNA, 1779 bp, Triticum aestivum
atgtcgggcctccgtctccgcccccgccgctcgtcatcttctacctttccgatgccccgctcccgcctccgtcactacgcctccgccatgccgatgtccagcctccgtcccctccaccgcagctcctcctccaccacgtcgcctgcacgcgcctggtccccccatgccgccttcgccgcggccacggagcgtgtccgcgccggggcgctcaggccggaagacgcacacaccctgttcgacgaattgcttcggcaggccacaccggtccccgagcgatccctcaacggcttccttgccgccctcgcccgtgcgcccgcctccggaaactgcatcagagatggccccgcccttgcagtggttctcttcaaccgtgtgtgcagagaggaagccggcccgcaggtggcggcgctcacaggctgcacctacagcatcctcatggactgctactgccgcgcccgtcgcccggacctagggcttgccttatttggccgcttcctcagggaaggcctgaagacacaccagatcgtcgccaacaccttcctcaagtgcctctgctatgcgaaattgacggatgaggcagtggacgtgctgcttcataggatgtccgagttcgggtgtgtgcctgatgccatctcatacaacactgtcctgaagagcttatgcgacaatggcatgagccagcgggggctcgaactgctccagatgattgcaaaagaagtaggtgtctgctctctcaatctggtggcatataacacggtcatctacggcttctttaaggaaggtgaaacaggcaaggcatgcaatctattccatgaaatgatgcagcaaggtgttgagcccgatgtggtgacttacaacttgatcattgatgctttgtgcaaggccagagcaatggacaaggcagaagtagtccttcagcagatgatcagtaaaggtgctcaacctgatacagtgacatataattgcatgatcaatggatatgccacatctgggcggttgaaaaaatctgctaaaatgttcagagaaatgaaaagccggggtcttatgccagatattgttacttgcaactccttcctgtcctccctttgcaagcatggaagaagcaaagaagctagagaaatatttgattccatgaccgccaagggccacaaaccggatatcgtctcataccgtattttgcttcatgggtatgccagtgaaggatgctttgctgatatgattgatctctttaattcaatgaaaagcaatggtattgcagctgactgccgtgttttcaccatattaattggtgcctatgctaaacacggaatgatggatgatgcaatgctcatatttacggaaatgcagcaacaaggtctgagtccaaatgtagtgacatattcaactgtaatatcagcactttctagaatgggtaggttggccaatgctatggagaaatttaatcagatgatttccatgggggttcaaccgaacaaagctgtttatcacaccctaattcagggctcttgtatgcatggtgatttgattaaagccaaggagctggtttctgaaatgatgaacaaaggtattcctcatcctagcattacgttcttcggttcaataataaacagtttatgcaaagatggaagggttatggatgcacatgatatctttgacttggttatagacataggtgagaggcctagtgccattacatttaattcactggttgacggatattgcttagttggcaagatggataaagcatttggaatgcttaatgccatggaatcactggta

SEQ ID NO: 2207 - DNA, 1779 bp, Triticum aestivum
atgtcgggcctccgtctccgtccccgccgctcgtcatcttctacctttccgatgccccgctcccgcctccgtcactacgcctccgccatgccgatgtccagcctccgtcccctccaccgcagctcctcctccaccacgtcgcctgcatgcgcctggtccccccatgccgccttcgccgcggccacggagcgtgtccgcgccggggcgctcaggccggaagacgcacacaccctgttcgacgaattgcttcggcaggccacaccggtccccgagcgatccctcaacggcttccttgccgccctcgcccgtgcgcccgcctccggaaactgcatcagagatggccccgcccttgcagtggttctcttcaaccgtgtgtgcagagaggaagccggcccgcaggtggcggcgctcacaggctgcacctacagcatcctcatggactgctactgccgcgcccgtcgcccggacctagggcttgccttatttggccgcttcctcagggaaggcctgaagacacaccagatcgtcgccaacaccttcctcaagtgcctctgctatgcgaaattgacggatgaggcagtggacgtgctgcttcataggatgtccgagctcgggtgtgtgcctgatgccatctcatacaacactgtcctgaagagcttatgcgacaatggcatgagccagcgggggctcgaactgctccagatgattgcaaaagaagtaggtgtctgctctctcaatctggtggcatataacacggtcatctacggcttctttaaggaaggtgaaacaggcaaggcatgcaatctattccatgaaatgatgcagcaaggtgttgagcccgatgtggtgacttacaacttgatcattgatgctttgtgcaaggccagagcaatggacaaggcagaagtagtccttcagcagatgatcagtaaaggtgctcaacctcatacagtgacatataattgcatgatcaatggatatgccacatctgggcggttgaaaaagtctgctaaaatgttcagagaaatgaaaagccggggtcttatgccagatattgttacttgcaactccttcctgtcctccctttgcaagcatggaagaagcaaagaagctagagaaatatttgattccatgaccgccaagggccacaaaccggatatcgtctcataccgtattttgcttcatgggtatgccagtgaaggatgctttgctgatatgattgatctctttaattcaatgaaaagcaatggtattgcagctgactgccgtgttttcaccatattaattggtgcctatgctaaacacggaatgatggatgatgcaatgctcatatttacggaaatgcagcaacaaggtctgagtccaaatgtagtgacatattcaactgtaatatcagcactttctagaatgggtaggttggccaatgctatggagaaatttaatcagatgatttccatgggggttcaaccgaacaaagctgtttatcacaccctaattcagggctcttgtatgcatggtgatttgattaaagccaaggagctggtttctgaaatgatgaacaaaggtattcctcgtcctagcattacgttcttcggttcaataataaacagtttatgcaaagatggaagggttatggatgcacatgatatctttgacttggttatagacataggtgagaggcctagtgccattacatttaattcactggttgacggatattgcttagttggcaagatggataaagcatttggaatgcttaatgccatggaatcactggta

SEQ ID NO: 2208 - DNA, 1779 bp, Triticum aestivum; identical to SEQ ID NO: 2206

SEQ ID NO: 2209 - DNA, 1779 bp, Triticum aestivum
atgtcgggcctccgtctccgtccccgccgctcgtcatcttctacctttccgatgccccgctcccgcctccgtcactacgcctccgccatgccgatgtccagcctccgtcccctccaccgcagctcctcctccaccacgtcgcctgcatgcgcctggtccccccatgccgccttcgccgcggccacggagcgtgtccgcgccggggcgctcaggccggaagacgcacacaccctgttcgacgaattgcttcggcaggccacaccggtccccgagcgatccctcaacggcttccttgccgccctcgcccgtgcgcccgcctccggaaactgcatcagagatggccccgccctcgcagtggttctcttcaaccgtgtgtgcagagaggaagccggcccgcaggtggcggcgctcacaggctgcacctacagcatcctcatggactgctactgccgcgcccgtcgcccggacctagggcttgccttatttggccgcttcctcagggaaggcctgaagacacaccagatcgtcgccaacaccttcctcaagtgcctctgctatgcgaaattgacggatgaggcagtggacgtgctgcttcataggatgtccgagctcgggtgtgtgcctgatgccatctcatacaacactgtcctgaagagcttatgcgacaatggcatgagccagcgggggctcgaactgctccagatgattgcaaaagaagtaggtgtctgctctctcaatctggtggcatataacacggtcatctacggcttctttaaggaaggtgaaacaggcaaggcatgcaatctattccatgaaatgatgcagcaaggtgttgagcccgatgtggtgacttacaacttgatcattgatgctttgtgcaaggccagagcaatggacaaggcagaagtagtccttcagcagatgatcagtaaaggtgctcaacctcatacagtgacatataattgcatgatcaatggatatgccacatctgggcggttgaaaaagtctgctaaaatgttcagagaaatgaaaagccggggtcttatgccagatattgttacttgcaactccttcctgtcctccctttgcaagcatggaagaagcaaagaagctagagaaatatttgattccatgaccgccaagggccacaaaccggatatcgtctcataccgtattttgcttcatgggtatgccagtgaaggatgctttgctgatatgattgatctctttaattcaatgaaaagcaatggtattgcagctgactgccgtgttttcaccatattaattggtgcctatgctaaacacggaatgatggatgatgcaatgctcatatttacggaaatgcagcaacaaggtctgagtccaaatgtagtgacatattcaactgtaatatcagcactttctagaatgggtaggttggccaatgctatggagaaatttaatcagatgatttccatgggggttcaaccgaacaaagctgtttatcacaccctaattcagggctcttgtatgcatggtgatttgattaaagccaaggagctggtttctgaaatgatgaacaaaggtattcctcgtcctagcattacgttcttcggttcaataataaacagtttatgcaaagatggaagggttatggatgcacatgatatctttgacttggttatagacataggtgagaggcctagtgccattacatttaattcactggttgacggatattgcttagttggcaagatggataaagcatttggaatgcttaatgccatggaatcactggta

SEQ ID NO: 2210 - DNA, 1779 bp, Triticum aestivum; identical to SEQ ID NO: 2206

SEQ ID NO: 2211 - DNA, 1587 bp, Triticum aestivum
atggtgagcatcggcgagcatgctcgtcctcctaactctgctttccttctacctaatcccagttcatgcccaggttgcgccggtgcggtggggggcgagcggcgccggcgtcctctgggtcctctgccattaccagattcttccagatccataggtggagctatgagccgccgcgccgtccccgctggcaggcgcatcttggagcagaacatcaaggcccggtaccgggctggagccattggcaccgacgatgcactccacctgtttgacgaattgctccaggttgcctggccctcctcaatcgccgccatcaactgcctcctcattgtcgtcggccgtgattgccctgcgctcgtcgtctccctcttcaaccacatcgcaagagccaaggtggcgccccacaatatcacctacgtcattctagtcgactgctgcagccgtgctggccgcttggaccttggcttcgctgccatgggccacattgttaagacgggatttgcggcaggatctgttgtctctttcagccacctgctcagggccgtctgtgcggagaagaagaccagctacggaatggacatcgtgctccgaattatgcctgagcttaactgcataccggatgtttactcctacagcattcttttcaagggcctctgcaacgagaagagaagccaagaggctctcgagctgattcacgtgatggttgagcacggaggtagctgccaacctaatctggtctcatataacaccgtaattgatggcttgttgaaagagggtgaggtgggcaaggcttacagcctattttgtgaaatggtacagagcgggattttggcaaatattgtgacctacaactcaatcatctttggcatgtgcaaggttcatgcaatggacaaggctgagaaggttcttcaacagatgtttgatagagaaattctgccagatactgccacatatactagcctaatacatggatattattcatcaggacaatgcaaagaggtggaacgggttttcgagcacatgtctataaatggtgttcaaccaaatatgataacttacaatatacagatggattatctttgcaagagcggaagatgcgcggaagctaggaagatctttgattctatggtcagtttgggccaaaaaccgtctgttactacctacagtattctgcttcatggttatgttatggaaaaatcatttcatgatatgcattgtctccttgatttgatggtagaaaatggtatctcaccagatcatcatgtctacaacatactcatatctgcatatgctaaagaggaaatggcaagtgaggtaatgcatatatttacaaaaatgcggcagcaaggattgaaccctagtgttgcggactatggagcggtaataaacttgctttccagtattggcagaatggatgatgctatgtcccaattcaatcaaatgatagccgaaggattagctcctgatatcatagttttcaacccccttattagtggtttttgtacttgtggcaaatgggagaaggttcatgaactattttctgaaatgttgaatcgcaccagcacaggcataagatcatcgaggcaacgt

SEQ ID NO: 2212 - DNA, 1470 bp, Triticum aestivum
atggtgagcatcggtgagcatgctcgtcctcctaactctgctttcattcttcctaatcccagttcatgcccaggttgcgccggtgcggtggggggcgagcggcgccggcgtcctctgggtcctctgccattaccagattcttccagatccataggtggagctatgagccgccgcgccgtccccgctggcaggcgcatcttggagcagaacatcaaggcccggtaccgggctggagccattggcaccgacgatgcactccacctgtttgacgaattgctccaggttgcctggccctcctcgatcgccgccatcaactgcctcctcattgtcgtcggccgtgattgccctgcgcccgccgtctccctcttcaaccacatcgcaagagccaaggtggcgccccacaatatcacctacggcattctagtcgactgctgcagccgtgctggccgcttggaccttggcttcgctgccatgggccacatcgttaagacgggatttgcggcaggatccgttgtctctttcagccacctgctcagggccgtctatgcgaagaagaagaccagctacggaatggacatcgtgctccgaattatgcctgagcttaactgcataccggatgtttactcctacagcattcttttcaagggcctctgcaacgagaagagaagccaagaggctctcgagctgattcacgtgatggttgagcacggaggtagctgccaacctaatctggtctcatacaacaccgtaattgatggcttgttgaaagagggtgaggtgggcaaggcttacagcctattttgtgaaatggtacagagcgggattttggcaaatattgtgacctacaactcaatcatctttggcatgtgcaaggttcatgcaatggacaaggctgagaaggttcttcaacagatgtttgatagagaaattctgccagatactgccacatatactagcctaatacatggatattattcatcaggacaatgcaaagaggtggaacgggttttcgagcacatgtctataaatggtgttcaaccaaatatgataacttacaatatacagatggattatctttgcaagagcggaagatgcgcggaagctaggaagatctttgattctatggtcagtttgggccaaaaaccgtctgttactacctacagtattctgcttcatggttatgttatggaaaaatcatttcatgatatgcattgtctccttgatttgatggtagaraatggtatctcaccagatcatcatgtctacaacatactcatatctgcatatgctaaagaggaaatggcaagtgaggtaatgcatatatttacaaaaatgcggcagcaaggattgaaccctagtgttgcgtatatccgacacacgcaactcgtgtgcctgacgggaagtgctatgtcgacacacggcccgccgaggtgttcttcctgtggtttgagcataactttgagatgtttc

SEQ ID NO: 2213 - DNA, 1755 bp, Triticum aestivum
  misc_feature (1391)..(1391): n is a, c, g, or t
atggtgagcatcggcgagcatgctcgtcctcctaactctactttccttcttcctaatcccagttcatgcccaggttgcgccggtgcggtggggggcgagcggcaccggcgtcctctgggtcctctgccattaccagattcttccagatccataggtggagctatgagccgccgcgccgtccccgctggcaggcgcatcttggagcagaacatcaaggcccggtaccgggctggagccattggcaccgacgatgcactccacctgtttgacgaattgctccaggttgcctggccctcctcgatcgccgccatcaactgcctcctcattgtcgtcggccgtgattgccctacgctcgccgtctccctcttcaaccacatcgcaagagccaaggtggcgccccacaatatcacctacggcattctagtcgactgctgcagccgtgctggccgcttggaccttggcttcgctgccatgggccacatcgttaagacgggatttgcggcaggatccgttgtctcttttagccacctgctcagggccgtctgtgcggagaagaagaccagctacggaatggacatcgtgctccgaattatgcctgagcttaactgcataccggatgtttactcctacagcattcttttcaagggcctctgcaacgagaagagaagccaagaggctctcgagctgattcacgtgatggttgagcacggaggtagctgccaacctaatctggtctcatacaacaccgtaattgatggcttgttgaaagagggtgaggtgggcaaggcttacagcctattttgtgaaatggtacagagcgggattttggcaaatattgtgacctacaactcaatcatctctggcatgtgcaaggttcatgcaatggacaaggctgagaaggttcttcaacagatgtttgatagagaaattctrccagatactgccacatatactagcctaatacatggatattattcatcaggacaatgcaaagaggtggaacgggttttcgagcacatgtctataaatggtgttcaaccaaatatgataacttacaatatacagatggattatctttgcaagagcggaagatgcgcggaagctaggaagatctttgattctatggtcagtttgggccaaaaaccgtttgttactacatacagtattctgcttcatggttatgttatggaaaaatcatttcatgatatgcattgtctccttgatttgatggtagaaaatggtatctcaccagatcatcatgtctacaacatactcatatctgcatatgctaaagaggaaatggcaagtgaggtaatgcatatatttacaaaaatgcggcagcaaggattgaaccctagtgttgcggactatggagcggtaataaacttgcnttccagtattggcagaatggatgatgctatgccccaattcaatcaaatgatagccgaaggattagctcctgatatcatagttttcaacccccttattagacgaagcaaccatcatttcactcttctctctcagcttcctctctacccaaccctcgcttctccctcatcttgttcctcatttcttcaagaaaaccctgacctgcttctgccattgttcttctctcccaaagaaggaaaggtgagcgcatcaatggtgttgattctggccaaggcccggtcttgcaaccccgagactgatcctataactccctctcttttcttcttttgggtttgtgattatggtttcttttcttttatttctatt

SEQ ID NO: 2214 - DNA, 1653 bp, Triticum aestivum
atggtgagcatcggtgagcatgctcgtcctcctaactctgctttcattcttcctaatcccagttcatgcccaggttgcgccggtgcggtggggggcgagcggcgccggcgtcctctgggtcctctgccattaccagattcttccagatccataggtggagctatgagccgccgcgccgtccccgctggcaggcgcatcttggagcagaacatcaaggcccggtaccgggctggagccattggcaccgacgatgcactccacctgtttgacgaattgctccaggttgcctggccctcctcgatcgccgccatcaactgcctcctcattgtcgtcggccgtgattgccctgcgcccgccgtctccctcttcaaccacatcgcaagagccaaggtggcgccccacaatatcacctacggcattctagtcgactgctgcagccgtgctggccgcttggaccttggcttcgctgccatgggccacatcgttaagacgggatttgcggcaggatccgttgtctctttcagccacctgctcagggccgtctatgcgaagaagaagaccagctacggaatggacatcgtgctccgaattatgcctgagcttaactgcataccggatgtttactcctacagcattcttttcaagggcctctgcaacgagaagagaagccaagaggctctcgagctgattcacgtgatggttgagcacggaggtagctgccaacctaatctggtctcatacaacaccgtaattgatggcttgttgaaagagggtgaggtgggcaaggcttacagcctattttgtgaaatggtacagagcgggattttggcaaatattgtgacctacaactcaatcatctttggcatgtgcaaggttcatgcaatggacaaggctgagaaggttcttcaacagatgtttgatagagaaattctgccagatactgccacatatactagcctaatacatggatattattcatcaggacaatgcaaagaggtggaacgggttttcgagcacatgtctataaatggtgttcaaccaaatatgataacttacaatatacagatggattatctttgcaagagcggaagatgcgcggaagctaggaagatctttgattctatggtcagtttgggccaaaaaccgtctgttactacctacagtattctgcttcatggttatgttatggaaaaatcatttcatgatatgcattgtctccttgatttgatggtagaaaatggtatctcaccagatcatcatgtctacaacatactcatatctgcatatgctaaagaggaaatggcaagtgaggtaatgcatatatttacaaaaatgcggcagcaaggattgaaccctagtgttgcggactatggagcggtaataaacttgctttccagtattggcagaatggatgatgctatgtcccaattcaatcaaatgatagccgaaggattagctcctaatatcatagttttcaacccccttattagtggtttttgtacttgtggcaaatgggagaaggttcatgaactattttctgaaatgttgaatcgcggcacctatcctgataccgtgttcttcaccacaattatggaccgcctttgcaaaaatggaagggttatggaagcccaagatatgtttggcctgatgatc

SEQ ID NO: 2215 - DNA, 1740 bp, Triticum aestivum
atggcgcacccgcccagcaaatcgaatcccagtcgcgccgagctccaaatcgaatctgaaattccccaatcccacacctccgtccgccgtcctccctccgctggacgcgcccgtggttggtcctcgccggcgcgggaccgcactcaccatcgcctcaggaagaagcgagcgagacccctctgtccagtgtctcctccgtccgtcctcctcccgccagggcttcaggtcgttgccgccagcattcaccgctgctgcagaaagacggcgacaatgtcacgccttcaggtccgctctttctccagccccgtttcctcacgcgccaacgatctgctgaccgaactccacggccatttgggcttcgggacgctcaggccagagctcgcgcaccaactgttcgacgaaatgctgcgccaacctgtcctagtatcagctcgtgcactcagcggcttatttgctgcacttgcgcgtgcgccgccctcacctgcctgcaccgatggctctgccctcgccattgatctcttcaactgcatggcccgagcaggccgtcgccaggcgacagtacccaccatttacacctacagcatactgattgagtgttgccaccgaacatgccgcccagacctagggcttgccttcttcggccgcctcctcaagacaggcatcccgacggacatcattacctacagcaacctattcaagtgcctctgtgacatgaagcgcacagaggaggctctgaacgtgctgctccataggatgcccgatgacctgcctaatgtcatctcctactcagtaattctcaagagcttctgcgacaatgggaggagccagcttgcgcttgatctgctccagatgatggccaaaaaaggtgctaaccactctcccgacgtgatgtcatacaacatggtaattgatggcttctttaaggagggagaatcaagcaaagcatgtgatctgttccatgaattgatgcagcagggggttgtgcccgatgtggtgatgtgtacctccatcatcaatgcgctatgcaaagcaagagcaatggacaaggcagaggtggttcttcgatcaatggttcataatggtgtccaaccagatgttgtgacatataatagcttgatccaaggatattcaactctgggacagttgaaagaacttgctaggttgttgaaagtgatgagaagccaaggtgttatgccatgcgttgctacctacaactcactcatgacctgcctttgcaagaatggaagattcaaggaagctgtagaaattttttattcgatggctgtgaagggccaaaaacctgatgtcgcctcatactctataatactccatggatacgctaaagaaggatcccttgttgacatgattgatctctgtcagttgatggcagcaaacggagtcatacctgacctccattgtttcaacatactaattgctacatatgctgaatatggaatgacagatgtggctatgcttttcttcgaagagatgttgaagcagggggtgcaccctaatgaagtcacatatttatctgtgatagctgggttatgcaaaacgggcaggatggatgatgctacggaaaaactcggtgagatgattgataggggagtaccacctgacaaaactgtttacatgtgcatgatggagggttattttaaacatggtgattccctgaaagccaaggaatttattaccaaaatgaagaacaaggatattcctcataggtcgcagaagggtaat

SEQ ID NO: 2216 - DNA, 912 bp, Triticum aestivum
atgcaaagaaggaagggttatgaatgcacaagtatctttgacttggttataggcatgggcgagaggcctaatgtcattacattcagttcactgattgacggatatggcttagtcggccagatgggtaaagcacttggagtgcttgatgccatggtatcagctggcattgagcctaatgttgttacgtatagttcacttcttgatggctattgtaaaaatggaaggatcaatgatgctttgattctgttcagagaaatgccacacaagagaattaaacctaacactgttacatatggcgtcatgctggatgggttgttccgtgctggcagaactgttgctgcaagggaaatgttccatgagatgaccgaaaggggtataccagtgagcatttccatatacaatataatacttggtggtctttgtagaaataattgtgcagacgaagcgatcgcactattccagaaattaggagcaaggaatgtcaagttcgatattataacactcaataccatgattaatgcaatgttcaaggttcggagaagagaagaagctaacgatttgtttgctgcaatatcagccagtgggttggtgcctgatgcttctacttacggtataatgatagaaaatattctaaaggaaggatcagtggaagaagttgacaatatgttttcatcaatggagaagagtggttgtgcacccagctctcgtcttataaattatgtcatcagaatgttgttggaaaaaggtgagattgccagggccgggaattatttatctaaagttgatgggaagatcatctcacttgaagcttcaactacttctttgttgttgtctctcttttcaagggaagggaaataccgggaaaacattgaactgcttcctgcaaagtatcaatttttcaatggatttggt

SEQ ID NO: 2217 - DNA, 912 bp, Triticum aestivum; identical to SEQ ID NO: 2216

SEQ ID NO: 2218 - DNA, 1707 bp, Triticum aestivum
atgatgcaccaaggtgttgagcccagtgtgtggacatatagctcaatcattgatgcattgtgcaaggccagagcaatggacaaggcagagctagtgcttcagcagatggttaacaaaggtgttcaacccaataatgtgacatataattgcatgatccatggatattccacatctgggaggtggaaagaggctgctaaattgtttagagaaatgaaaagccggggccttataccagatacttttacttgcaacgccttaatgacttacctttgtaagcatggaagaagcaaagaagctgcagaattttttgatgccatgactgccaaaggccacagaaatgtcaactcctactgtattttgcttcatgggtatgccaatgaaggatgctttgctgatatgattgatctctttaattcaatggaaagcaatggttttgtagccgactgccatgttttcaccatattaattgatgcatatgctaaacgtggaatgatggatgaagctatgctcatatttactgaaatgcgggaaaaaggagtgagtcccaatgtagtcacctattccactgtaatagccgcactttgcagattgggtaggctgtccgatgctatggacaggttcaatgagatgactgatatgggtgtacagccgaacacagctgtttatcgctccctaattcagggtttttgtatgcttggtgatttggttaaagttaaggaatttgtttctgaaatgatgaacaaaggtattcctcgtcctgacattgcgttcttcacttcagtaataaactctttatgcaaagaaggaagggttatgaatgcacaaggtatctttgacttggttataggcatgggcgagaggcctaatgtcattatattcagttcactgattgacggatatggcttagtcggccagatgggtaaagcacttggagtgcttgatgccatggtatcagctggcattgagcctaatgttgttacgtatagttcactacttgatggctattgtagaaatggaaggatcaatgatgctttgattctgttcagagaaatgccacacaagagaattaaacctgacactgttacatatggcatcatgctggatgggttgttccgtgctggcagaactgttgctgcaagggaaatgttccatgagatgaccgaaaggggtataccagtgagcatttccatatacaatataatacttcgtggtctttgtagaaataattgtgcagacgaagcgatcgcactattccagaaattaggagcaaggaatgtcaagttcgatattataacactcaataccatgattaatgcaatgttcaaggttcggagaagagaagaagctaacgatttgttttctgcaatatcagccagtgggttggtgcctaatgcttctacttacggtataatgatagaaaatattctaaaggaaggatcagtggaagaagttgacaatatgttttcatcaatggagaagagtggttgtgcacccagctctcgtcttataaattatgtcatcagaatgttgttggaaaaaggtgagattgccagggccgggaattatttatctaaagttgatgggaagatcatctcacttgaagcttcaactacttctttgttgttgtctctcttttcaagggaagggaaataccgggaaaacattgaattgcttcctgcaaagtatcaatttttcaatggatttggt

SEQ ID NO: 2219 - DNA, 1707 bp, Triticum aestivum; identical to SEQ ID NO: 2218

SEQ ID NO: 2220 - DNA, 912 bp, Triticum aestivum; identical to SEQ ID NO: 2216

SEQ ID NO: 2221 - DNA, 912 bp, Triticum aestivum; identical to SEQ ID NO: 2216

SEQ ID NO: 2222 - DNA, 1707 bp, Triticum aestivum; identical to SEQ ID NO: 2218

SEQ ID NO: 2223 - DNA, 1338 bp, Triticum aestivum
atgctgcgccaacccgtcccggtttcagcacgcgcactcggcggcttattttctgccctcgcgcgtgcgccgccctcaaccgcctgtactgatggccccgccctcgccatcgatctcttcaactgcatgacccgagtaagccgccgccgggtgatagcacctgacatttacacctacaacatactaattgactgctgccacaaagcatgccgcccagacctagggcctgccttcttcggctgcctcctcaagacaggcatcacaatgagcgtcattacctacagcagcttattcaagtgcctctgtgacatgaagcgcacagacgaggctttggacgtgctgctccacaggatgcccgaggacctgcctgatatcatctcctactcagtaattctcaagagcttctgcgacaacggaaggagccagtgtgcgcttgacctgctccggatgatggccaaaaaaggtactgaccattcccccaacgtggtgtcatacaacttggtaatcgatggcttctttaaggaaggtgaaggaagcaaagcatgcgatctgttccatgaaatgatacaacaggggcctgtgcctgatgtggtgacgtatacctccgtcatcgttgcgctatgcaaagcaagagcaatggacaaggcagaggtggtccttcgacaaatggttcatgatggtgttcagccgaatactgtgacatataatagcttgatccaaggatattcaactttgggacagttgaaagaagtcgctaggttgttgaaagtgatgagaagccaaggtgttttgccaagcgctgttacttgcagctcagtcatggactacctttgcaagcatggaagaatcaaagaagctgaggaaatattttattccatggccgtgaatggccgaaaaccagatatagtgtcatactctattatgctccttgggtacgctatggaaggatcccttgttaaaatgattgatctctgtgagctgatggcaagagatggagttgtacctgacctccgttgtttcaacatactgattaatgcatatgctaagtatggcaggatggatgtggccatgcttttctttgaagacatgttgaagcagggtgtgaagcctaatgaattcacttatttaactgtgatatctgtattttgcaagatgggtaggatggatgatgcgatggaaaaattcagtgagatgattgatatgggagtaccacctgacacaaaagtttacatgtgcatggttgagggttatttgaatcttggcgattccatgaaagccaaggaatttattaccaaaatgaagaacatggatattcatcataggccgcggaaaggtaat

SEQ ID NO: 2224 - DNA, 1251 bp, Triticum aestivum
atgcgctgctgctgccgcgcgcgccgccctggcctggggcttgccttcttcggccgcctcctcaggacgggcctgaggacagacggcgtcgacgcatacgccctcatcaagtgcttctgcctcgcaaaacggacagacgaggctgtcagcgtgcggctccataggttgcctgaactcggccgtgtacctgatgctttatcatactccgttgttctgaaggtcttgtgtgacgatggcaggagccagcgagcgctcggcctgctccagatgatgtggaaagagggaggtggctgcgcccctaatgtggtggcgtatagcactgtcatccacggcttctgcaaggaaggcaaagtaagcaaggcatgcgagctgttcaatgaaatggtgcagcaaggagttaagcctaatgtggtgacatacacccaagtgattgatgcgctgtgcaaggcaagagcaatggacaaggcagagtcgttccttcggcatatggttgataatgatgttcgacccaacaacgtgacatataagtgtatcatccagggatattcctctttgggctggtgggaagaggcagtaaaaatattcagagaaacgacaagccggggtcttatactagatgatgttactcgcaactcgttcgtgtcctccctttgcaaccatggaagaagcaaggaagctgcggagattgcccatcagataattgaaaatggaacaacagtgagcatttccacatacggtataattcttggagaactttgtaggaatgattgcaccgaggaagcaatcgtactgttccacaaattaggtgcagtggatgtgaagttcgatattacaatattcaataccatgattgatgcaatgtacagggttcgaagaagagaagaagctaacattttgtttgctgcaatatctgccaatggattggtacctaatgcttctacttacagaataatgataacaaatcttttaaaagaaggatcaatggaagaagctgatcatatgttctcatcaatggagacgagtggttatgctcccagctctgttctgttaaatgatatcattagaatgttgctagaaaaaggtgagatagtcaaggctggaaattatttgtctaaagttgatgggaagagcatctcacttgaagcttcaactggtttgttgatgaggcatctattttcaacggaaggaaaatatcatgagcaaataaaatcactccctgaaaggtatcaatattttggagtcagacacagt

SEQ ID NO: 2225 - DNA, 1251 bp, Triticum aestivum; identical to SEQ ID NO: 2224

SEQ ID NO: 2226 - DNA, 1251 bp, Triticum aestivum; identical to SEQ ID NO: 2224

SEQ ID NO: 2227 - DNA, 1251 bp, Triticum aestivum; identical to SEQ ID NO: 2224

SEQ ID NO: 2228 - DNA, 1251 bp, Triticum aestivum; identical to SEQ ID NO: 2224

SEQ ID NO: 2229 - DNA, 1251 bp, Triticum aestivum; identical to SEQ ID NO: 2224

SEQ ID NO: 2230 - DNA, 1173 bp, Triticum aestivum
atgcctggcttctcctccgccgcgtcaatgtcgccactgcgcctccgcctccgcctgcacgcccgccactcctccgcctcgcaaccctcacgccgccagggatgggatccccacgccgccttcgccgccgccacggagtgtgcgcgctccggcaacctcaccccggaggacgcacataacctgttcgacgaattgctgcggcagggcaatcctgtccttgggcgccccctcaacaaccttctcgccgccctcgcccgcgcgccggcgtccagcgcctgcagagatggccccgcactcgtggtcgccctcttcagccgcatatcccaaggcgcccgcctaagggtgctgcacccaacggcctgcacctacggcatcctcatggactgcagctgccgcgcacaccgcctcgatctggcgtttgccttcttcggccgtctcctcaggacgggactgaaggcaggcgtcatagaagtcaacagtctcctcaaaggactctgccacgcaaagcgggcggatgaggccatggaagtgcttcttcacaggatgcctgagctgtttataggagtacagggcacagctgtttatcgttccctaatccagggattttgtacacacggcgatttggtgaaagcaaaggaatatgttactgaaatgatgaagaaaggtatgcctcctcctgatattatgttcttcagttcaatcatgcagaacctatgcacagaaggaagggtaatagaagcacgagatatccttgacttgatagtgcgcattggtatgaggcctgatgttttcatatttaatatactgatcggtggatactgcctagtcggcaagatggaggatgcctcaaaaatatttgatgatatggtgtcatatggtttagaaccttgtaactttacgtatggtatacttattaatggctattgcaaaaataaaaggattgatgacgggcttattctgttcaaagagatgctgcgcaagggacttaaacctacaacttttaattataacgtcatactggatggattatttctggctggacaaactgttgctgcaaaagagaagtttgatgagatggttgaatctggagtaagtgtgtgcattgatacatactctatagttcttggtggactttgtagaaatagctgcagtagcgaagcgatcaccctgttc

SEQ ID NO: 2231 - DNA, 1173 bp, Triticum aestivum; identical to SEQ ID NO: 2230

SEQ ID NO: 2232 - DNA, 1452 bp, Triticum aestivum
atgtcacgccttcaggtccgctctttctccaactctgtttcttcacacgccaacgagctgctggacaaactccaaggccatctgcactccaggacgctcaggccagacctcgtgcaccaactgttcgacgaaatgctgcgccaaccagtcccagtatcagtacgtgcactcaacggcttatttgctgcccttgcgcgtgcgccgtcctccaccatctgcaccgatgcccctgccctcgccattgatctcttcaaccgcatggcccgagcaggccgtcgccaggtgccagcacccaccattcacacctacagcatgctaattgagtgttgccagcgagcatgccgcccagacctagggcttgccttcttcggccgcctactcaagacaggcatcaagacgaatgccattacctacagcagcttactcaagtgcctctgtgacatgaagcgcacggaggaggctttgggcgtgctgctccacaggatgcccgacgacctgcctaatgccatctcctactcagtaattctcaagagtttctgcgacagtggtaggagccagcttgtgcttgacttgctccggatgatggccgaaaaaggatctgaccactctcccagcgtggtgtcatacagcttggtaatcgatggcttctttaaggagggtgaaataagcaaagcatgcaatctgctccatgaaatgatgcagcagggggttgtgcccgatgtggtgacgtataactcctttatcgatgcgctatgcaaagcaagagcaatggaaaaggcagaggtagttcttcgatcaatggttcataatggtgtccaaccaaatgctgtcacatatagtagcttgatccaaggatattcaactttgggccagttgaaagaagtcgctaggctgttgaaagcaatgagaagccaaggcagtatgccagacgttgttatttgcagctcagtcatggactacctttgcaagcatggaagaatcaaagatgccgaggaaatattttactccatggccgtgaatggccgaaaaccagatatagtctcatacactattatgctccacgggtacgctatagaaggatcccttgttaaaatgattgatctctgtgagctgatggcaagagatggagttgtacccgacctccgttgtgcatatgctaagtatggcatgatggatgtggccatgcttttccttgaagacatgttgaagcagggtgtgaagcctaatgaattcacttatttaactgtgatatctgcattttgcaagatgggcaggatggatgatgcgatggaaaaattcagtgagatgattgatatgggagtaccagttgacaccgaagtttacatgtgcatggttgagggttattttaatcatggtgattccatgaaagccgagaaatttattaccaaaatgaagaacagggatattcatcataagctgcggaaaggtaat

SEQ ID NO: 2233 - DNA, 1470 bp, Triticum aestivum
atgtcacgccttcaggtccgctctttctccaactctgtttcttcacacgccaacgagctgctggacaaactccaaggccatctgcactccaggacgctcaggccagacctcgtgcaccaactgttcgacgaaatgctgcgccaaccagtcccagtatcagtacgtgcactcaacggcttatttgctgcccttgcgcgtgcgccgtcctccaccatctgcaccgatgcccctgccctcgccattgatctcttcaaccgcatggcccgagcaggccgtcgccaggtgccagcacccaccattcacacctacagcatgctaattgagtgttgccagcgagcatgccgcccagacctagggcttgccttcttcggccgcctactcaagacaggcatcaagacgaatgccattacctacagcagcttactcaagtgcctctgtgacatgaagcgcacggaggaggctttgggcgtgctgctccacaggatgcccgacgacctgcctaatgccatctcctactcagtaattctcaagagtttctgcgacagtggtaggagccagcttgtgcttgacttgctccggatgatggccgaaaaaggatctgaccactctcccagcgtggtgtcatacagcttggtaatcgatggcttctttaaggagggtgaaataagcaaagcatgcaatctgctccatgaaatgatgcagcagggggttgtgcccgatgtggtgacgtataactcctttatcgatgcgctatgcaaagcaagagcaatggaaaaggcagaggtagttcttcgatcaatggttcataatggtgtccaaccaaatgctgtcacatatagtagcttgatccaaggatattcaactttgggccagttgaaagaagtcgctaggctgttgaaagcaatgagaagccaaggcagtatgccagacgttgttatttgcagctcagtcatggactacctttgcaagcatggaagaatcaaagatgccgaggaaatattttactccatggccgtgaatggccgaaaaccagatatagtctcatacactattatgctccacgggtacgctatagaaggatcccttgttaaaatgattgatctctgtgagctgatggcaagagatggagttgtacccgacctccgttgtttcaacatactgattaatgcatatgctaagtatggcatgatggatgtggccatgcttttccttgaagacatgttgaagcagggtgtgaagcctaatgaattcacttatttaactgtgatatctgcattttgcaagatgggcaggatggatgatgcgatggaaaaattcagtgagatgattgatatgggagtaccagttgacaccgaagtttacatgtgcatggttgagggttattttaatcatggtgattccatgaaagccgagaaatttattaccaaaatgaagaacagggatattcatcataagctgcggaaaggtaat

SEQ ID NO: 2234 - DNA, 1470 bp, Triticum aestivum
atgtcacgccttcaggtccgctctttctccaactctgtttcttcacacgccaacgagctgctggacaaactccaaggccatctgcactccaggacgctcaggccagacctcgtgcaccaactgttcgacgaaatgctgcgccaaccagtcccagtatcagtacgtgcactcaacggcttatttgctgcccttgcgcgtgcgccgtcctccaccatctgcaccgatgcccctgccctcgccattgatctcttcaaccgcatggcccgagcaggccgtcgccaggtgccagcacccaccattcacacctacagcatactaattgagtgttgccagcgagcatgccgcccagacctagggcttgccttcttcggccgcctactcaagacaggcatcaagacgaatgccattacctacagcagcttactcaagtgcctctgtgacatgaagcgcacggaggaggctttgggcgtgctgctccacaggatgcccgacgacctgcctaatgccatctcctactcagtaattctcaagagtttctgcgacagtggtaggagccagcttgtgcttgacttgctccggatgatggccgaaaaaggatctgaccactctcccagcgtggtgtcatacagcttggtaatcgatggcttctttaaggagggtgaaataagcaaagcatgcaatctgctccatgaaatgatgcagcagggggttgtgcccgatgtggtgacgtataactcctttatcgatgcgctatgcaaagcaagagcaatggaaaaggcagaggtagttcttcgatcaatggttcataatggtgtccaaccaaatgctgtcacatatagtagcttgatccaaggatattcaactttgggccagttgaaagaagtcgctaggctgttgaaagcaatgagaagccaaggcagtatgccagacgttgttatttgcagctcagtcatggactacctttgcaagcatggaagaatcaaagatgccgaggaaatattttactccatggccgtgaatggccgaaaaccagatatagtctcatacactattatgctccacgggtacgctatagaaggatcccttgttaaaatgattgatctctgtgagctgatggcaagagatggagttgtacccgacctccgttgtttcaacatactgattaatgcatatgctaagtatggcatgatggatgtggccatgcttttccttgaagacatgttgaagcagggtgtgaagcctaatgaattcacttatttaactgtgatatctgcattttgcaagatgggcaggatggatgatgcgatggaaaaattcagtgagatgattgatatgggagtaccagttgacaccgaagtttacatgtgcatggttgagggttattttaatcatggtgattccatgaaagccgagaaatttattaccaaaatgaagaacagggatattcatcataagctgcggaaaggtaat

SEQ ID NO: 2235 - DNA, 1470 bp, Triticum aestivum; identical to SEQ ID NO: 2233

SEQ ID NO: 2236 - DNA, 1470 bp, Triticum aestivum; identical to SEQ ID NO: 2233

SEQ ID NO: 2237 - DNA, 1470 bp, Triticum aestivum; identical to SEQ ID NO: 2233

SEQ ID NO: 2238 - DNA, 1626 bp, Triticum aestivum
atgcctcgcctctcctccaccacgccaatgtcaccaccacgcctccgcctccgactccgcggccgccactcctcctccacctctcatccctcacgcatctgggatccccacgccgccttcgccggcgcgacgcagcgggcgcactctggcaacctcaccccggaggacgcacaccacctgttcgacgaattgctgcggcagggcaatcctgtccaggagcgtcccttgactaactttctggctgccctcgcccgcgcgcccgcgtccgcatcctgcagcgatggccccgccctggccgtagccctcttcggtcgtttgtcccgaggcgccggacgacgcgtggcacagccaaatgtcttcacctatggcgtcctcatggactgctgctgccgcgcgtgccgcccggatctggcgctcgctttcttcggccgtctcttcaggaagggcctggaggcaaaccgagtcatcttctgcaccctcctcaagggactctgccacgcaaagcgcacagatgaggctctggacgtgctgcttcacaggatgcctgagctgggctgcacccccaacgtggtggcatataccacggtcatccacggcttctttaaggaaggccaagtaggcaaggcatgcaatctgttccatggaatggcgcagcagggcgttgcgcctaatttggtgacatataactcggttattgatgcgttgtgcaaggccaaagcaatggacaaggcagagtatttccttggtcagatggttgatgatggtgtcgtacctgataatgtgacatataatagcctcatccatggatattcctcttcaggccactggaaggaggcagttagggtattcaaagagatgacaagtcggagggttacagcagatgtgcatacttacaacatgtttatgacctttctttgcaaacatggaagaagcaaagaagctgcaggaatttttgataccatggctattaagggcctgaaacctgacaacgtttcatatgctattctccttcatgggtatgccaccgaaggatgcttagttgatatgattaatctcttcaattcaatggaaagagattgtattctacctgactgtcgtatcttcaacatactgattaatgcatatgctaaatctgggaagcttgataaggctatgcttatcttcaatgaaatgcagaaacaaggagtgagtccaaatgcagtcacatattcaaccgtaatacatacattttgcaaaaagggtaggttggatgatgctgtgataaagtttaatcagatgattgatacaggagtacgacagggcacagctgtttatggttctctaatccagggtttttgtacacacggcgatttggtgaaagcaaaggaattgcttactgaaatgatgaacaaaggtatgcttcctcctgatatcaagttcttccattcaatcatgcagaacctttgcacagaaggaagggtaatagaagcacgggatgtccttggcttgatagcgcacataggtatgaggcctgatgtttgcacatttaatatactgatcggtggatactgcctagtcggcaagatggaggatgcctcaaaaatatttgatgatatgatgtcatatggcttagaaccttctaattgt

SEQ ID NO: 2239 - DNA, 1626 bp, Triticum aestivum; identical to SEQ ID NO: 2238

SEQ ID NO: 2240 - DNA, 1611 bp, Triticum aestivum
atggttgagcatggaggtagctgccaacctaatgtggtgacctatagcaccgtgattgatggcttgttgacagagggtgaggtgaacaaggcttacagcctattttgtgaaatgttacagaggggaatttcgccgaatgttgtgacctgtagttcaatcatctctggcatgtgcaagcttcatgcgatggacaaggcggaggaggttcttcaacagatgtttgagagacgaattctgccagatgttgccacatatactagtctaatacatggatattattcattaggacagtgcaaagaggtggattggattttatgggaaatgtctagaaatggtgttcaaccagatattgtaacttacaatatacagatggattatctttgtaagagcggaaggtgcgcaaaagctaggaaaatatttgattccatggtcggtttgggccaaaaaccagatgttactacctacaacgttctgcttcatgggtatgctatggaaagatcttttcatgatatgaattgtctcattgagttgatggatgataatggtatttcaccagatcattatggctacaacatactcatatctgcttatgctaaagaaaaaatggttgatgaagtaatgcatatatttacaaaaatgcggcagcaaggactgaaccctgatgtagtgaactatggagcggcagtaaacttgctttccaagattggccgaatggatgatgctatgtcccaattcaatcaaatgataactgaagggttagctcctgatatcatagttttcaccccccttattagtggtttctgttcttgtggcaaatgggagaaggttgatgaactattttctgagatgttggatcgcggcatctgtcccaacacagtgttcttcaacacaatcatggaccgcctttgcaaaaatgaaagggttatggaagcccaagatctcttcgacctgatggtacacatgggtgtgaagcctgatgtgtgtacttataacacactgataggtggatacttgttcgttggtaagatggatgaagtgagcaagttacttgacaatatggtctcaattggcatggaaccagatgttatcacctataacatactgattgatggttactctaagaatggaaagatagatgatgcattggttgtttttagggggatgttggaaaggaaggataagccttctgttatcacttttaatattatgattggtgcgttgcttaaatgtcacaggaaggaagaagcaaaagatttgtttgacggtatctgggccaaaggattagttcctgatgttgttacatatagcttaatgatacaaaaacttatagaagaaggttctctacaagagtctgatgatctattcctttctatggagaagaatggatgtgctgccgactcccgcatgctaaatgctatagttagaagcttacttcagaaaggggatgtgcccagggctgggacttatctgtctaaaattaatgagaggagcttcacccttgaaggttccacagctaccttgttgactgcacttgcgtcaggggggagaggccaggaatataaggagttactccctgagaaataccactcttttctggaacagggcattgat

SEQ ID NO: 2241 - DNA, 1611 bp, Triticum aestivum; identical to SEQ ID NO: 2240

SEQ ID NO: 2242 - DNA, 1611 bp, Triticum aestivum; identical to SEQ ID NO: 2240

SEQ ID NO: 2243 - DNA, 1611 bp, Triticum aestivum; identical to SEQ ID NO: 2240

SEQ ID NO: 2244 - DNA, 1611 bp, Triticum aestivum; identical to SEQ ID NO: 2240

SEQ ID NO: 2245 - DNA, 1611 bp, Triticum aestivum; identical to SEQ ID NO: 2240

SEQ ID NO: 2246 - DNA, 663 bp, Triticum aestivum
atgatcgccgtgtctctcttcaaccgcctgtgccgagaagccagcccacatgcgtcgcctcttacagtccacacctacggcatcctcacggactgctgctgccgcgcgcgtcgccctgacctggggcttgccttcttcggccgcctcctcaggacgggcctgaggacagacggcgtcgacgcgtacgccctcatcaagtgcttctgcctcgcaaaacggacagatgaggctgtcagcgtgctgctccataggttgcctgaactcggctgtgcgcctgatgccttatcatactccgttgttctgaaggtcttgtgtgacgatggccggagccagcgagcgttcgacctgctccagatgatgtcgaaagaaggaggtggctgcgcccccaacgtggtggcatatagcacggtcatccacggcttctgtaaggaaggcaaagtaagcaaggcatgcgatctgttcgatgaaatggtgcagcaaggagttaagcctaatgtggtgacatatacctcgataattgatgcgctgtgcaaggccagagcaatggacaaggcagagtcgttccttcggcatatggtcgataatgatgttcgacctgctatattatctactcttttggactatattgggctttattttccacctttatattatttttgggac

SEQ ID NO: 2247 - DNA, 1629 bp, Triticum aestivum
atggcagtgatgcctcgcctccactccaccacgcccatgccccgcctcctccgccgcctctcctccacctccacctccacctcggcgccctcacgctgctgggaccccagcgccgccctcgccgcggccacggagcgcgtccgcgccgggacgctccgcccggcagacgcacaccagctgttcgacgaattgctgcagcaggcaaccccggtccctggtccagccctgaacggcttcctcgccgcccttgcccgtgctccagcctccgccgcctgcacagacagccccgccctcgccgtgtctctcttcaaccgcctgtgccgagaagccagcccacatgcgtcgcctcttacagtccacacctacggcatcctcacggactgctgctgccgcgcgcgtcgccctgacctggggcttgccttcttcggccgcctcctcaggacgggcctgaggacagacggcgtcgacgcgtacgccctcatcaagtgcttctgcctcgcaaaacggacagatgaggctgtcagcgtgctgctccataggttgcctgaactcggctgtgcgcctgatgccttatcatactccgtcgttctgaaggtcttgtgtgacgatggccggagccagcgagcgttcgacctgctccagatgatgtcgaaagaaggaggtggctgcgcccccaacgtggtggcatatagcacggtcatccacggcttctgtaaggaaggcaaagtaagcaaggcatgcgatctgttcgatgaaatggtgcagcaaggagttaagcctaatgtggtgacatatacctcgataattgatgcgctgtgcaaggccagagcaatggacaaggcagagtcgttccttcggcatatggtcgataatgatgttcgacccaacaacgtgacatataagtatatgatccagggatattcctctttgggctggtgggaagaggcagtaaaaatattcagagaaactacaagccggggtcttatactagacgatgttactcgcaactcattcgtggcctccctttgcaaccatggaagaagcaaggaagctgcagagattgcccgtcagatgattgaaactggaacaacagtgagcatttccacatatggtataattcttggagaactttgtaggaataattgcactgaggaagcaatcgtactgttccacaaattaggtgcagtgaatgtgaagtttgatattacaatattcaataccatgattgatgcaatgtacagggttcgaagaagagaagaagctaacattttgtttgctgcaatatctgccaatggattggtacctaatgcttctacttacagaataatgataacaaatcttttaaaagaaggatcaatggaagaagctgatcatatgttttcatcaatggagacgagtggttatgctcccagctccgttctgttaaatgatatcatcagaatgttgctagaaaaaggtgagatagtcaaggctggaaattatttgtctaaagttgatgggaagagcatctcacttgaagattcaactggtttgtcgatggtgcatctattttcaagagaaggcaaatatcatgagcaaataaaatcactccctgcaatctatcgatttttcggaggagtcagacacagt

SEQ ID NO: 2248 - DNA, 1632 bp, Triticum aestivum
atggcagtgatgcctcgcttccactccaccacgcccactccccgcctcctccgccgcctctcctccacctccgcctccacctcggcgcccccacgctgctgggatcccagcgccgccctcaccgcggccacggagcgcgtccgcgccgggacgctcagcccggcagacgcacaccacctgttcgacgaattgttgcagcggccaaccccggtccctggtccagccctgaacggcttcctcgcggcccttgcccgtgctccagcctccgccgcctgcagagacagcccctccctcgccgtctctatcttcaaccgcctgtgccgagaagccagcccacatggacatgcgtcgcctcttacagcccacacctacggcatcctcatgcgctgctgctgccgcgcgcgccgccctggcctggggcttgccttcttcggccgcctcctcaggacgggcctgaggacagacggcgtcgacgcatacgccctcatcaagtgcttctgcctcgcaaaacggacagacgaggctgtcagcgtgctgctccataggttgcctgaactcggccgtgtacctgatgctttatcatactccgttgttctgaaggtcttgtgtgacgatggcaggagccagcgagcgctcggcctgctccagatgatgtggaaagaaggaggtggctgcgcccctaatgtggtggcgtatagcactgtcatccacggcttctgcaaggaaggcaaagtaagcaaggcatgcgagctgttcaatgaaatggtgcagcaaggagttaagcctaatgtggtgacatacacctcagtgattgatgcgctgtgcaaggcaagagcaatggacaaggcagagtcgttccttcggcatatggttgataatgatgttcgacccaacaacgtgacatataagtgtatcatccagggatattcctctttgggctggtgggaagaggcagtaaaaatattcagagaaacgacaagccagggtcttatactagatgatgttactcgcaactcgttcgtgtcctccctttgcaaccatggaagaagcaaggaagctgcggagattgcccatcagataattgaaaatggaacaacagtgagcatttccacatacggtataattcttggagaactttgtaggaatgattgcaccgaggaagcaatcgtactgttccacaaattaggtgcagtggatgtgaagttcgatattacaatattcaataccatgattgatgcaatgtacagggttcgaagaagagaagaagctaacattttgtttgctgcaatatctgccaatggattggtacctaatgcttctacttacagaataatgataacaaatcttttaaaagaaggatcaatggaagaagctgatcatatgttctcatcaatggagacgagtggttatgctcccagctctgttctgttaaatgatatcattagaatgttgctagaaaaaggtgagatagtcaaggctggaaattatttgtctaaagttgatgggaagagcatctcacttgaagcttcaactggtttgttgatgaggcatctattttcaacggaaggaaaatatcatgagcaaataaaatcactccctgaaaggtatcaattttttggagtcagacacggt

SEQ ID NO: 2249 - DNA, 879 bp, Triticum aestivum
atgtttgacttcattctaggtattggtcggcggcctgatgtgattatgtacaattcactgatggatggatattgccttgttggcaaggtggaggaagcactgagagtacttgatgctatgaagtctgctggcctccaacctactgctgttacgtatgctatacttcttaatggctactgtaaaattggcaggatcgccgatggattgagtcttttcagggaaatgtcactcagcggggttaaacccacgacttttatgtacaacattatatttgatgggctgtttcgctccgggagagcagtttctgcaaaggaaaaattccgtacgatgactgaaagtggcataccagtgggcgttgacacatactacatagttcttcatggactttgtaaaaataattgcactggtgaagcaatagagctgttcaagaaactacgtgcaatgaacgtgaagattgatgtcataacactcaataccatgatttctgtaatgtttaaaactaggagaattgaagaagccaaggatttgtttgctactatatcagccatcggattggtgccttctgttgtgacttacagtgtaatgatgacgaatttcatagaagaagggttgctggcagaggctgatgatatgtttttagcaatggagaaggctggctgtgctcctgactcgagactgctaaatcacgtggtcagagtgttgctggagaatggtgcagttgtaaaggctgcaacttatctcgctaaacttgatgcaaaacagctgtcagttgaagcttcgacggtttcgttaatactatctctcttctcaaggaaagggaaattaagggagcatgtaaaattgcttccggtaaagtaccagcctcctgagatgttggac

SEQ ID NO: 2250 - DNA, 1602 bp, Triticum aestivum
atggttgatcaaggaattgaacccaatatcaagacatataactgtctgatccatggatattctacttttggtcagtggaaggaggcacttagggtattcaaagaaatggcaagtcttggtgttgtaccagacgttgtcacgttgacctcattaatcgattccctttgcaagcacagaaggacaaaggaagctagagaaatttttgactctatggctgcaaagggcctgaaacctaatatcgtctcctactctactatgcttaatgggtatgtcaaagaaggatccttcgaggatatgactgatctcttcaattcgatggtacggaatggtgttgtaccaaaccaccatattttcaacatactgatcaatgcatatgctaaacgtggactgatggatgaggctatgcacatgttcgaagtaatgaggcaacaaggagtaaacccagatgtagttgactatctagtaataatggattcactttgcaaaatgggtaggatggatgctgctctggacaaatttaatcagatggtcaatcaaggagtttcacctaacaaagctgtttaccaatgcctggttctgggttcttgctctcatggtcattttgtgaaagccaaggatttgatctctgaagcaattaatagaggtctgttttctaacagtgtgttcttctatcctgtaataaacgacctatgcaaagaaggaaaggtaaacgaggcacaggatatgtttgacttcattctaggtattggtcggcggcctgatgtgattatgtacaattcactgatggatggatattgccttgttggcaaggtggaggaagcactgagagtacttgatgctatgaagtctgctggcctccaacctactgctgttacgtatgctatacttcttaatggctactgtaaaattggcaggatcaccgatggattgagtcttttcagggaaatgtcactcagcggggttaaacccacgacttttatgtacaacattatatttgatgggctgttttgctccgggagagcagtttctgcaaaggaaaaattccgtacgatgactgaaagtggcataccagtgggcgttgacacatacaacatagttcttcatggactttgtaaaaataattgcactggtgaagcaatagagctgttcaagaaactacgtgcaatgaacgtgaagattgatgtcataacactcaataccatgatttctgtaatgtttaaaactaggagaattgaagaagccaaggatttgtttgctactatatcagccatcggattggtgccttctattgtgacttacagtgtaatgatgacgaatttcatagaagaagggttgctggcagaggctgatgatatgtttttagcaatggagaaggctggctgtgctcctgactcgagactgctaaatcacgtggtcagagtgttgctggagaatggtgcagttgtaaaggctgcaacttatctcgctaaacttgatgcaaaacagctgtcagttgaagcttcgacggtttcgttaatactatctctcttctcaaggaaagggaaattaagggagcatgtaaaattgcttccggtaaagtaccagcctcctgagatgttggac

SEQ ID NO: 2251 - DNA, 1602 bp, Triticum aestivum; identical to SEQ ID NO: 2250

SEQ ID NO: 2252 - DNA, 879 bp, Triticum aestivum; identical to SEQ ID NO: 2249

SEQ ID NO: 2253 - DNA, 624 bp, Triticum aestivum
atgtacaacattatatttgatgggctgtttcgctccgggagagcagtttctgcaaaggaaaaattccgtacgatgactgaaagtggcataccagtgggcgttgacacatacaacatagttcttcatggactttgtaaaaataattgcactggtgaagcaatagagctgttcaagaaactacgtgcaatgaacgtgaagattgatgtcataacactcaataccatgatttctgtaatgtttaaaactaggagaattgaagaagccaaggatttgtttgctactatatcagccatcagattggtgccttctgttgtgacttacagtgtaatgatgacgaatttcatagaagaagggttgctggcagaggctgatgatatgtttttagcaatggagaaggctggctgtgctcctgactcgagactgctaaatcacgtggtcagagtgttgctggagaatggtgcagttgtaaaggctgcaacttatctcgctaaacttgatgcaaaacagctgtcagttgaagcttcgacggtttcgttaatactatctctcttctcaaggaaagggaaattaagggagcatgtaaaattgcttccggtaaagtaccagcctcctgagatgttggac

SEQ ID NO: 2254 - DNA, 1152 bp, Triticum aestivum
atgagccgccgctttgtccccgtcgacaggcgcatcttggagcggaacatcaaggctcggtaccacgctggagacattggcaccgaggatgcactcaacctgttcgacgaattgatccaggttgctgggccttcctcagtcctcgccatcaactgcctcctcaccgttgtcggccgtgattgccccgcgctcggcgtctccctcttcaaccgtgttgcaagagccaaggtgcctccccacaatatcacctatagcattctagtcgattgctgctgccgtgctggccgcttggaccttggacacgctgccatgggacacgttattaagctgggatttgcagcagaagccatcgtcaatttcagccacctactcaaagccatctgcgccgagaagaagaccagctatgcaatggacatcgtactccggataatgcccgagtttaactgcataccaaacattttctcctataacattcttttcaagggtctctgcaacgagaagaggagccaagaggctcccgagctgattcacatcatggctgaggatggaggcagctgccaacctaatgtcgtgtcctataacaccgtaattgatggcttgttgaaagagggtgaggtgggccaggcctacagcctattttgtgtcatgctacagaggggaatttcgccgaatgttgtgacctgcacttcaatcatctctggcatgtgcaaagttcatgcgatggacaaggcagaggaggttcttcaacagatgactgatagacgaattctgccagatgttgccacatataacagtctcatacatggatattattcattaggacagtgcaaagaggttgatcggatttttaaggagatgactagaaatggtgtccaaccaaatgttgtaacttacaatatacagatggattatctttgcaagagcggaaggtgtgcggaagctaggaagatttttgattccatgatcagtttgggccaaaaaccgaccgttactacctacaacatactgcttcatgggtatgctatggaaagatcttttcatgatatgaattgtatcattgagttgatggatgataatggtatttcaccagatcattattgctacaacatactcatatctgcatataaaaaaaaaagggcaacctggtgcatg

SEQ ID NO: 2255 - DNA, 1635 bp, Triticum aestivum
atgagccgccgctttgtccccgtcgacaggcgcatcttggagcggaacatcaaggctcggtaccacgctggagacattggcaccgaggatgcactcaacctgttcgacgaattgatccaggttgctgggccttcctcagtcctcgccatcaactgcctcctcaccgttgtcggccgtgattgccccgcgctcggcgtctccctcttcaaccgtgttgcaagagccaaggtgcctccccacaatatcacctatagcattctagtcgattgctgctgccgtgctggccgcttggaccttggacacgctgccatgggacacgttattaagctgggatttgcagcagaagccatcgtcaatttcagccacctactcaaagccatctgcgccgagaagaagaccaactatgcaatggacatcgtactccggataatgcccgagtttaactgcataccaaacattttctcctataacattcttttcaagggtctctgcaacgagaagaggagccaagaggctctcgagctgattcacatcatggctgaggatggaggcagctgccaacctaatgtcgtgtcctataacaccgtaattgatggcttgttgaaagagggtgaggtgggccaggcctacagcctattttgtgtcatgctacagaggggaatttcgccgaatgttgtgacctgcacttcaatcatctctggcatgtgcaaagttcatgcgatggacaaggcagaggaggttcttcaacagatgactgatagacgaattcttccagatgttgccacatataacagtctcatacatggatattattcattaggacagtgcaaagaggttgatcggattttcaaggagatgactagaaatggtgtccaaccaaatgttgtaacttacaatatacagatggattatctttgcaagagcggaaggtgtgcagaagctaggaagatttttgattccatgatcagtttgggccaaaaaccgaccgttactacctacaacatactgcttcatgggtatgctatggaaagatcttttcatgatatgaattgtatcattgagttgatggatgataatggtatttcaccagatcattattgctacaacatactcacatctgcatatgctaaagaaaaaatggttgatgaagtaatgcatatatctacaaaaatgcggcagcaaggactgaaccctgatgtagagaactatggagcggtagtaaacttgctttccaagattggccgaatggatgatgctatgtcccaattcaatcaaatgataactgaagggttagctcctgatatcatagttttcaccccccttattagtggtttctgttcttgtggcaaatgggagaaggttgatgaactattttctgagatgttggatcgtggcatctgtcccgacacagtgttcttcaacactgttatggatcacctttgcaaaaatggaagggttatagaagcccaagatgtgttcgacctgatggtacacatgggtgtgaagcctgacgtgcgtagtcatgtcacactgatgcatggatactttgcagatggtaagatggatgaaatgaggaagttacttgaaaatatgtgctcaattggcttgaaactgatgttgtcacctatagcatac

SEQ ID NO: 2256 - DNA, 1629 bp, Triticum aestivum
atgcctcgcttctcctccagcacgccaatgtcgccaccccgcctccgcctccgactcggcggacgccactcctcctccacctctcatccctcacgcatctgggatccccacgccgccttcgccacaggcacggagcgggcggtatttggcacgctcactacggaggacgcacaccacctgttcgacgaattgctgcggcatggcaatcctgtccaggagcgctccttgaataactttctagctaccctcgcccgcgcgcccacgtccgcatcctgcagcgacggccccgccctagccgtcgccctcttcggccgtttgtcccgaggcgccggacgacgggtggcgcagccaaatgtcttcacctatggcgtcctcatggactgctgctgccgtgcgcgccgcctggatctggtgatcgccttcttcggccgtctcctcaagacgggcctggaggcagaccgagtcgttttcagcaccctcctcaagggactctgccatgcaaagcgctcagatgaggctctggacgtgctgcttcacaggatgcctgggctgggctgcacccccggcgtagtggcgtataacaccgtcatccatggcttctttaaggaaggtcaagtaggcaaggcatgcaatctatttcatgaaatggcgcagcagggcgttatgcctgatgtggtgacatatagctcggttattgatgcgctgtgcaaggccagagcaatggacaaggcagagtatttccttcgtcagatggttgatgatggtgtcgtacctaataatgtcacatataatagcctcatccatggatattcctcttcaggccattggaaggaggcagttagggtattcaaagagatgacaagtcggagggttacaccagatgtgcatacttacaacatgtttatgacctttctttgcaaacatggaagaagcaaagaagctgcaggaatttttgagaccatggctatgaagggcctgaaacctaacaacgtttcatatgctattctccttcatgggtatgccactgaaggatgcttagttgatatgattaatctcttcaattcaatgactagagatggtattcggcctaactgtcacactttgaacatactgattaatgcatatgctaaatctggcatgatggatgaggctatgcttatctttaaaggaatgcggaaacagggagtgagtccagatgtagtcacctattcaactgtaatacatgcattttgcaaaatgggtagcttggacattgctatggacaaatttaaccagatggttgatatgggagtacgaccgaatgcagttgtttatcattccctaatccagagtttttgtacacatggggatttcgtgaaagcaaaggaattggttactgaaatgaggaacaaaggtatgcgtcctcctgatattaacttcttccattcaataatgcagaacctatgcacagaaggaagggtaacagaagcacgggatatccttgacttgatagtgcacataggtatgaggcctgatgttctcatatttagtttactgatcgatggatactgcctagtctccaagatggaggatgcatcaaaaatatttgatgatatggtgtcatatggtttggaaccttctaatattacg

SEQ ID NO: 2257 - DNA, 1629 bp, Triticum aestivum
atgcctcgcttctcctccagcacgccaatgtcgccaccccgcctccgcctccgactcggcggacgccactcctcctccacctctcatccctcacgcatctgggatccccacgccgccttcgccaccggcacggagcgggcggtatttggcacgctcactacggaggacgcacaccacctgttcgacgaattgctgcggcatggcaatcctgtccaggagcgctccttgaataactttctagctaccctcgcccgcgcgcccacgtccgcatcctgcagcgacggccccgccctagccgtcgccctcttcggccgtttgtcccgaggcgccggacgacgggtggcgcagccaaatgtcttcacctatggcgtcctcatggactgctgctgccgtgcgcgccgcctggatctggtgatcgccttcttcggccgtctcctcaagacgggcctggaggcagaccgagtcgttttcagcaccctcctcaagggactctgccatgcaaagcgctcagatgaggctctggacgtgctgcttcacaggatgcctgggctgggctgcacccccggcgtagtggcgtataacaccgtcatccatggcttctttaaggaaggtcaagtaggcaaggcatgcaatctatttcatgaaatggcgcagcagggcgttatgcctgatgtggtgacatatagctcggttattgatgcgctgtgcaaggccagagcaatggacaaggcagagtatttccttcgtcagatggttgatgatggtgtcgtacctaataatgtcacatataatagcctcatccatggatattcctcttcaggccattggaaggaggcagttagggtattcaaagagatgacaagtcggagggttacaccagatgtgcatacttacaacatgtttatgacctttctttgcaaacatggaagaagcaaagaagctgcaggaatttttgagaccatggctatgaagggcctgaaacctaacaacgtttcatatgctattctccttcatgggtatgccactgaaggatgcttagttgatatgattaatctcttcaattcaatgactagagatggtattcggcctaactgtcacactttgaacatactgattaatgcatatgctaaatctggcatgatggatgaggctatgcttatctttaaaggaatgcggaaacagggagtgagtccagatgtagtcacctattcaactgtaatacatgcattttgcaaaatgggtagcttggacattgctatggacaaatttaaccagatggttgatatgggagtacgaccgaatgcagttgtttatcattccctaatccagagtttttgtacacatggggatttcgtgaaagcaaaggaattggttactgaaatgaggaacaaaggtatgcgtcctcctgatattaacttcttccattcaataatgcagaacctatgcacagaaggaagggtaacagaagcacgggatatccttgacttgatagtgcacataggtatgaggcctgatgttctcatatttagtttactgatcgatggatactgcctagtctccaagatggaggatgcatcaaaaatatttgatgatatggtgtcatatggtttggaaccttctaatattacg

SEQ ID NO: 2258 - DNA, 1629 bp, Triticum aestivum; identical to SEQ ID NO: 2257

SEQ ID NO: 2259 - DNA, 1629 bp, Triticum aestivum; identical to SEQ ID NO: 2256

SEQ ID NO: 2260 - DNA, 1629 bp, Triticum aestivum; identical to SEQ ID NO: 2257

SEQ ID NO: 2261 - DNA, 1254 bp, Triticum aestivum
atggactgctgctgccgtgcgcgccgcctggatctggtgatcgccttcttcggccgtctcctcaagacgggcctggaggcagaccgagtcgttttcagcaccctcctcaagggactctgccatgcaaagcgctcagatgaggctctggacgtgctgcttcacaggatgcctgggctgggctgcacccccggcgtagtggcgtataacaccgtcatccatggcttctttaaggaaggtcaagtaggcaaggcatgcaatctatttcatgaaatggcgcagcagggcgttatgcctgatgtggtgacatatagctcggttattgatgcgctgtgcaaggccagagcaatggacaaggcagagtatttccttcgtcagatggttgatgatggtgtcgtacctaataatgtcacatataatagcctcatccatggatattcctcttcaggccattggaaggaggcagttagggtattcaaagagatgacaagtcggagggttacaccagatgtgcatacttacaacatgtttatgacctttctttgcaaacatggaagaagcaaagaagctgcaggaatttttgagaccatggctatgaagggcctgaaacctaacaacgtttcatatgctattctccttcatgggtatgccactgaaggatgcttagttgatatgattaatctcttcaattcaatgactagagatggtattcggcctaactgtcacactttgaacatactgattaatgcatatgctaaatctggcatgatggatgaggctatgcttatctttaaaggaatgcggaaacagggagtgagtccagatgtagtcacctattcaactgtaatacatgcattttgcaaaatgggtagcttggacattgctatggacaaatttaaccagatggttgatatgggagtacgaccgaatgcagttgtttatcattccctaatccagagtttttgtacacatggggatttcgtgaaagcaaaggaattggttactgaaatgaggaacaaaggtatgcgtcctcctgatattaacttcttccattcaataatgcagaacctatgcacagaaggaagggtaacagaagcacgggatatccttgacttgatagtgcacataggtatgaggcctgatgttctcatatttagtttactgatcgatggatactgcctagtctccaagatggaggatgcatcaaaaatatttgatgatatggtgtcatatggtttggaaccttctaatattacg

SEQ ID NO: 2262 - DNA, 1551 bp, Triticum aestivum
atgcgcccatgccgcacgcctctcctcgactccacctcgccgctgtccgtgctcctcctcgaccacctccaccgcaatcgcccctcccctcccccctcagcctcgccgccgtcagccttctggtctcccatcgccgcattcgccgctgccacgaagcgcgcccgagccgggacgctcagccctgaggacgcacaccacctgttcgacgaattgctacgccagtccaacccggttcccaatcgcttcctgaacaacttccttgccgccctcgcccgtgctccaccctccgacgtctgcggagatggccccgccctcaccgtcgccctcttcaaccgcctgtgccgagaagaagccggcccttgtgtagcgccgcccactatctatacctacagcattctaatggacagctgctgccgcgtgggtcgcccggaccttgggcttgctgtcttcggacgcctactcaagtcgggcttcaaggcagaccagatcactgccagcagcctcctcatgtgcctctgcgatgtaggacagacaaacgagcctgtggacgtgctgcttcgtaggatctccaagctcggctgtgagcctaatgtcatcccatacaacatagttcttaagagcttatgtgacagtagaaggagccagcaagctcttgacctgctcctgatgatggcacaaagaggttgccgctcccctgatgtggtgtcatataacatcgtcattcatggcttatttaaggaaggtgaagtaagcatggcgtgctcattattctatgaaatgatgcggcaaagggttatgcctaatgtggtgacatatagatcgatgattggtgcgttgtgcaaggtcggggcaacggacaaggcaaagatggtccttggtcatatggttggtaatggttttcgaccagatatgtatacttggaactcattcatggcatctctttgcaagcagggaagaagcaaggaagctgcacaactttttgattacatggtcgccaagggctacaaacctgatgttgtcacgtactctactctgcttcatgggtatgctactgaaggatgcttcactgatatgattaatctctttaattcaatggaaggcaacggtattgtagctaacagctgtgtttttaacatactaattgacgcatatgctaaacgtggaatgatgcatgaagctatgctcatatttactgaaatgcgggaacgaagagtgagtcctgatatattcacctatggaattataatagctgcactttgcagaatgggtaggctatctgatgctatggagaaaataaatgaaatggttgctgcaggattacaaccggacaaggctgtttactattccctaattcagggtttttgtacacatgatgatttggtcaaagctaaggagttggtttctgagatgatgaccaaaggtattcctcgtcctaacattgtgttcttcaactcggtaatagccagtctgtgcaaagaaggaagggttaaggatgcacacggtatctttgacttggctatgaacattggtgagaggcccgatttaattcac

SEQ ID NO: 2263 - DNA, 804 bp, Triticum aestivum
atgtcgctgctccgtctccgcctccgcctccatgcccgccgctcctactccacctcgcatcccccacgcagccagggctgggatccccacgccgccttcgctgctgccacggagcgcgcgcgatctggcaatctcacctcggaggacgcacacaagctgttcgaccaattgctcctgcaggctaatccggtcaacatgcgccttcccaacgaccttctcaccgccctggctcgcgcgcctgcgttcgcagcctgcagcaacggccccgccctcgccgtcgccctcttcagccgtttgtcccaaagtgcccgccaacgggtggtgcagccaacggcctgcacccacggcatcctcatggactgctgctgccgcgcacaccgcctggatctggcgctcgccttcttcgcccgtctcctcaggacgggactcaaggcaggcgtcatagaagtcaacactcttctcaagggactctgccgcgcaaagcgggctgatgaggctctggacattctgcttcacaggatgcctgagctgggctgcacccccaacgtggtggcatataccacggtcatccacggcttctttaaggaaggccaagtaagcaaggcatgcaatctattccatgaaatggcgctgcagggcgttacacctgatgtggtgacatataactcggttattgatgcgctgtgcaaggccagagccatggacaaggcagagtatttccttggtcagatggttgatgatggtgtcgtacctgataatgtgacatataatagcctcatccatggatattccttttcaggccac

SEQ ID NO: 2264 - DNA, 1557 bp, Triticum aestivum
atgtcgctgctccgtctccgcctccgcctccatgcccgccgctcctactccacctcgcatcccccacgcagccagggctgggatccccacgccgccttcgctgctgccacggagcgcgcgcgatctggcaatctcacctcggaggacgcacacaagctgttcgaccaattgctcctgcaggctaatccggtcaacatgcgccttcccaacgaccttctcaccgccctggctcgcgcgcctgcgttcgcagcctgcagcaacggccccgccctcgccgtcgccctcttcagccgtttgtcccaaggtgcccgccaacgggtggtgcagccaacggcctgcacccacggcatcctcatggactgctgctgcaacgcacaccgcctggatctggcgctcgccttcttcgcccgtctcctcaggacgggactcaaggcaggcgtcatagaagtcaacactcttctcaagggactctgccgcgcaaagcgggctcatgaggctctggacattctgcttcacaggatgcctgagctgggctgcacccccaacgtggtggcatataccacggtcatccacggcttctttaaggaaggccaagtaagcaaggcatgcaatctattccatgaaatggcgctgcagggcgttacacctgatgtggtgacatataactcggttattgatgcgctgtgcaaggccagagccatggacaaggcagagtatttccttggtcagatggttgatgatggtgtcgtacctgataatgtgacatataatagcctcatccatggatattccttttcaggccactggaaggaggctgttagggtattcaaacagatgacaagtcggagggttacagcagatgtgcatacttacaacatgtttatgacctttctttgcaaacatggaagaagcaaagaagctgcaggaatttttgataccatggctatcaagggcctgaaacctgacaacgtttcatatgctattctccttcatgggtatgccaccgaaggatgcttagttgatatgattaatctcttcaattcaatggaaagagattgtattctacctgactgtcgtatcttcaacatactgattaatgcatatgctaaatctgggaagcttgataaggctatgcttatcttcaatgaaatgcagaaacaaggagtgagtccaaatgcagttacatattcaactgtaatagatgcattttgcaaaaagggtcagttggacgatgctatgataaagtttaatcagatgattgatacaggaatacgacagggcacaactgtttatggtttttgtacacacggcgatttggtgaaagcaaaggaattgcttactgaaatgatgaacaaaggtatacctcctcctgatattaagttcttccattcaatcatgcagaaccttggcacagaaggaagggtaatagaagcacgggatgtccttggcttgatagcgcacataggtatgaggcctaatgtttgcacatttaatatactgagcggtggatattgcctttcggcaagatggaggatgcctcaaaaatatttgatgata

SEQ ID NO: 2265 - DNA, 738 bp, Triticum aestivum
atgacaagtcggagggttacagcagatgtgcatacttacaacatgtttatgaactttctttgcaaacatggaagaagcaaagaagctgcaggaatttttgataccatggctatcaagggcctgaaacctgacaacgtttcatatgctattctccttcatgggtatgccaccgaaggatgcttagttgatatgattaatctcttcaattcaatggaaagagattgtattctacctgactgtcgtatcttcaacatactgattaatgcatatgctaaatttgggaagcttgataaggctatgcttatcttcaatgaaatgcagaaacaaggagtgagtccaaatgcagttacatattcaactgtaatagatgcattttgcaaaaagggtcagttggacgatgctatgataaagtttaatcagatgattgatacaggaatacgacagggcacaactgtttatggttctctaatccagggtttttgtacacacggcgatttggtgaaagcaaaggaattggttactgaaatgatgaacaaaggtatacctcctcctgatattaagttcttccattcaatcatgcagaaccttggcacagaaggaagggtaatagaagcacgggatgtccttggcttgatagcgcacataggtatgaggcctaatgtttgcacatttaatatactgagcggtggatattgcctttcggcaagatggaggatgcctcaaaaatatttgatgata

SEQ ID NO: 2266 - DNA, 1659 bp, Triticum aestivum
atggtgagcatcggcgagcatgctcgtcctcctaactctgctttccttcttcctaatcccagttcatgcccaggttgcgtcggtgcggtggggggcgagcggcaccggcgtcctctaggtcctctgccattaccagattcttccagatccataggtggagctatgagccgccgcgccgtccccgctggcaggcgcatcttggagcagaacatcaaggcccggtaccgggctggagccattggcaccgacgatgcactccacctgtttgacgaattgctccaggttgcctggccctcctcgatcgccaccatcaactgcctcctcattgtcgtcggccgtgattgccctgcgctcgccgtctccctcttcaaccacatcgcaagagccaaggtggcgccccacaatatcacctacggcattctagtcgactgctgcagccgtgctggccgcttggaccttggcttcgctgccatgggccacatcgttaagacgggatttgcggcaggatccgttatctctttcagccacctgctcagggccgtctgtgcggagaagaagaccagctacggaatggacatcgtgctccgaattatgcctgagcttaactgcataccggatgtttactcctacagcattcttttcaagggcctctgcaacgagaagagaagccaagaggctctcgagctgattcacgtgatggttgagcacggaggtagctgccaacctaatctggtctcatacaacaccgtaattgatggcttgttgaaagagggtgaggtgggcaaggcttacagcctattttgtgaaatggtacagagcgggattttggcaaatattgtgacctacaactcaatcatctctggcatgtgcaaagaggtggaacgggttttcgagcacatgtctataaatggtgttcaaccaaatatgataacttacaatatacagatggattatcttcgcaagagcggaagatgcgcggaagctaggaagatctttgattctatggtcagtttgggccaaaaaccgtatgttactacctacagtattctgcttaatggttatgttatggaaaaatcatttcatgatatgcattgtctccttgatttgatggtagaaaatggtatcttaccagatcatcatgtctacaacatactcatatctgcatatgctaaagaggaaatggcaagtgaggtaatgcatatatttacaaaaatgcggcagcaaggattgaaccctagtgttgcggactatggagcggtaataaacttgcattccagtattggcagaatggatgatgctatgccccaattcaatcaaatgatagccgaaggattagctcctgatatcatagttttcaacccccttattagtggtttttgtacttgtggcaaatgggagaaggttcatgaactattttctgaaatgttgaatcgcggcacctatcctgataccgtgttcttcaccacaattatggaccgcctttgcaaaaatggaagggttatggaagcccaagatatgtttgacctgatggtacacgtgggtgttaagcctaatgttcatacttatgccacattgatgcatgggtactttttcgttaggaagatggatgaagtgaggaagttacttggcaatatgctctcaattggctcgaaaccggat

SEQ ID NO: 2267 - DNA, 1659 bp, Triticum aestivum
atggtgagcatcggcgagcatgctcgtcctcctaactctgctttccttcttcctaatcccagttcatgcccaggttgcgccggtgcggtggggggcgagcggcgccggcgtcctctgggtcctctgccactaccagattcttccagatccataggtggagctatgagccgccgcgccgtccccgctggcaggcgcatcttggagcagaacatcaaggcccggtaccgggctggagccattggcaccgacgatgcactccacctgtttgacgaattgctccaggttgcctggccctcctcgatcgccgccatcaactgcctcctcattgtcgtcggccgtgattgccctgcgctcgccgtctccctcttcaaccacatcgcaagagccaaggtggcgccccacaatatcacctacggcattctagtcgactgctgcagccgtgctggccgcttggaccttggcttcgctgccatgggccacatcgttaagacgggatttgcggcaggatccgttgtctctttcagccacctgctcagggccgtctgtgcgaagaagaagacaagctacggaatggacatcgtgctccgaattatgcctgagcttaactgcataccggatgtttactcctacagcattcttttcaagggcctctgcaacgagaagagaagccaagaggctctcgagctgattcacgtgatggttgagcacggaggtagctgccaacctaatctggtctcatacaacaccgtaattgatggcttgttgaaagagggtgaggtgggcaaggcttacagcctattttgtgaaatggtacagagcgggattttggcaaatattgtgacctacaactcaatcatctctggcatgtgcaaagaggtggaacgggttttcgagcacatgtctataaatggtgttcaaccaaatatgataacttacaatatacagatggattatctttgcaagagcggaagatgcgcggaagctaggaagatctttgattctatggtcagtttgggccaaaaaccgtctgttactacctacagtattctgcttcatggttatgttatggaaaaatcatttcatgatatgcattgtctccttgatttgatggtagaaaatggtatctcaccagatcatcatgtctacaacatactcatatctgcatatgctaaagaggaaatggcaagtgaggtaatgcatatatttacaaaaatgcggcagcaaggatcgaaccctagtgttgcggactatggagcggtaataaacttgctttccagtattggcagaatggatgatgctatgtcccaattcaatcaaatgatagccgaaggattagctcctgatatcatagttttcaacccccttattagtggtttttgtacttgtggaaaatgggagaaggttcatgaactattttctgaaatgttgaatcgcggcacctatcctgataccgtgttcttcaccacaattatggaccgcctttgcaaaaatggaagggttatggaagcccaagatatgtttgacctgatggtacacgtgggtgttaagcctaatgttcatacttatgccacattgatgcatgggtactttttcgttaggaagatggatgaagtgaggaagttacttggcaatgtgctctcaattggctcgaaaccggat

SEQ ID NO: 2268 - DNA, 1659 bp, Triticum aestivum
atggtgagcatcggcgagcatgctcgtcctcctaactctactttccttcttcctaatcccagttcatgcccaggttgcgccggtgcggtggggggcgagcggcaccggcgtcctctgggtcctctgccattaccagattcttccagatccataggtggagctatgagccgccgcgccgtccccgctggcaggcgcatcttggagcagaacatcaaggcccggtaccgggctggagccattggcaccgacgatgcactccacctgtttgacgaattgctccaggttgcctggccctcctcgatcgccgccatcaactgcctcctcattgtcgtcggccgtgattgccctgcgctcgccgtctccctcttcaaccacatcgcaagagccaaggtggcgccccacaatatcacctacggcattctagtcgactgctgcagccgtgctggccgcttggaccttggcttcgctgccatgggccacatcgttaagacgggatttgcggcaggatccgttgtctctttcagccacctgctcagggccgtctgtgcgaagaagaagacaagctacggaatggacatcgtgctccgaattatgcctgagcttaactgcataccggatgtttactcctacagcattcttttcaagggcctctgcaacgagaagagaagccaagaggctctcgagctgattcacgtgatggttgagcacggaggtagctgccaacctaatctggtctcatacaacaccgtaattgatggcttgttgaaagagggtgaggtgggcaaggcttacagcctattttgtgaaatggtacagagcgggattttggcaaatattgtgacctacaactcaatcatctctggcatgtgcaaagaggtggaacgggttttcgagcacatgtctataaatggtgttcaaccaaatatgataacttacaatatacagatggattatctttgcaagagcggaagatgcgcggaagctaggaagatctttgattctatggtcagtttgggccaaaaaccgtctgttactacctacagtattctgcttcatggttatgttatggaaaaatcatttcatgatatgcattgtctccttgatttgatggtagaaaatggtatctcaccagatcatcatgtctacaacatactcatatctgcatatgctaaagaggaaatggcaagtgaggtaatgcatatatttacaaaaatgcggcagcaaggatcgaaccctagtgttgcggactatggagcggtaataaacttgctttccagtattggcagaatggatgatgctatgtcccaattcaatcaaatgatagccgaaggattagctcctgatatcatagttttcaacccccttattagtggtttttgtacttgtggaaaatgggagaaggttcatgaactattttctgaaatgttgaatcgcggcacctatcctgataccgtgttcttcaccacaattatggaccgcctttgcaaaaatggaagggttatggaagcccaagatatgtttgacctgatggtacacgtgggtgttaagcctaatgttcatacttatgccacattgatgcatgggtactttttcgttaggaagatggatgaagtgaggaagttacttggcaatgtgctctcaattggctcgaaaccggat

SEQ ID NO: 2269 - DNA, 1659 bp, Triticum aestivum
atggtgagcatcggcgagcatgctcgtcctcctaactctgctttccttcttcctaatcccagttcatgcccaggttgcgtcggtgcagtggggggcgagcggcaccggcgtcctctgggtcctctgccattaccagattcttccagatccataggtggagctatgagccgccgcgccgtccccgctggcaggcgcatcttggagcagaacatcaaggcccggtaccgggctggagccattggcaccgacgatgcactccacctgtttgacgaattgctccaggttgcctggccctcctcgatcgccgccatcaactgcctcctcattgtcgtcggccgtgattgccctgcgctcgccgtctccctcttcaaccacatcgcaagagccaaggtggcgccccacaatatcacctacggcattctagtcgactgctgcagccgtgctggccgcttggaccttggcttcgctgccatgggccacatcgttaagacgggatttgcggcaggatccgttgtctctttcagccacctgctcagggccgtctgtgcgaagaagaagacaagctacggaatggacatcgtgctccgaattatgcctgagcttaactgcataccggatgtttactcctacagcattcttttcaagggcctctgcaacgagaagagaagccaagaggctctcgagctgattcacgtgatggttgagcacggaggtagctgccaacctaatctggtctcatacaacaccgtaattgatggcttgttgaaagagggtgaggtgggcaaggcttacagcctattttgtgaaatggtacagagcgggattttggcaaatattgtgacctacaactcaatcatctctggcatgtgcaaagaggtggaacgggttttcgagcacatgtctataaatggtgttcaaccaaatatgataacttacaatatacagatggattatctttgcaagagcggaagatgcgcggaagctaggaagatctttgattctatggtcagtttgggccaaaaaccgtctgttactacctacagtattctgcttcatggttatgttatggaaaaatcatttcatgatatgcattgtctccttgatttgatggtagaaaatggtatctcaccagatcatcatgtctacaacatactcatatctgcatatgctaaagaggaaatggcaagtgaggtaatgcatatatttacaaaaatgcggcagcaaggatcgaaccctagtgttgcggactatggagcggtaataaacttgctttccagtattggcagaatggatgatgctatgtcccaattcaatcaaatgatagccgaaggattagctcctgatatcatagttttcaacccccttattagtggtttttgtacttgtggaaaatgggagaaggttcatgaactattttctgaaatgttgaatcgcggcacctatcctgataccgtgttcttcaccacaattatggaccgcctttgcaaaaatggaagggttatggaagcccaagatatgtttgacctgatggtacacgtgggtgttaagcctaatgttcatacttatgccacattgatgcatgggtactttttcgttaggaagatggatgaagtgaggaagttacttggcaatgtgctctcaattggctcgaaaccggat

SEQ ID NO: 2270 - DNA, 1659 bp, Triticum aestivum
atggtgagcatcggcgagcatgctcgtcctcctaactctgctttccttcttcctaatcccagttcatgcccaggttgcgtcggtgcggtggggggcgagcggcaccggcgtcctctgggtcctctgccattaccagattcttccagatccataggtggagctatgagccgccgcgccgtccccgctggcaggcgcatcttggagcagaacatcaaggcccggtaccgggctggagccattggcaccgacgatgcactccacctgtttgacgaattgctccaggttgcctggccctcctcgatcgccgccatcaactgcctcctcattgtcgtcggccgtgattgccctgcgctcgccgtctccctcttcaaccacatcgcaagagccaaggtggcgccccacaatatcacctacggcattctagtcgactgctgcagccgtgctggccgcttggaccttggcttcgctgccatgggccacatcgttaagacgggatttgcggcaggatccgttgtctctttcagccacctgctcagggccgtctgtgcgaagaagaagacaagctacggaatggacatcgtgctccgaattatgcctgagcttaactgcataccggatgtttactcctacagcattcttttcaagggcctctgcaacgagaagagaagccaagaggctctcgagctgattcacgtgatggttgagcacggaggtagctgccaacctaatctggtctcatacaacaccgtaattgatggcttgttgaaagagggtgaggtgggcaaggcttacagcctattttgtgaaatggtacagagcgggattttggcaaatattgtgacctacaactcaatcatctctggcatgtgcaaagaggtggaacgggttttcgagcacatgtctataaatggtgttcaaccaaatatgataacttacaatatacagatggattatctttgcaagagcggaagatgcgcggaagctaggaagatctttgattctatggtcagtttgggccaaaaaccgtctgttactacctacagtattctgcttcatggttatgttatggaaaaatcatttcatgatatgcattgtctccttgatttgatggtagaaaatggtatctcaccagatcatcatgtctacaacatactcatatctgcatatgctaaagaggaaatggcaagtgaggtaatgcatatatttacaaaaatgcggcagcaaggatcgaaccctagtgttgcggactatggagcggtaataaacttgctttccagtattggcagaatggatgatgctatgtcccaattcaatcaaatgatagccgaaggattagctcctgatatcatagttttcaacccccttattagtggtttttgtacttgtggaaaatgggagaaggttcatgaactattttctgaaatgttgaatcgcggcacctatcctgataccgtgttcttcaccacaattatggaccgcctttgcaaaaatggaagggttatggaagcccaagatatgtttgacctgatggtacacgtgggtgttaagcctaatgttcatacttatgccacattgatgcatgggtactttttcgttaggaagatggatgaagtgaggaagttacttggcaatgtgctctcaattggctcgaaaccggat

SEQ ID NO: 2271 - DNA, 1530 bp, Triticum aestivum
atgatgtccgagctcggctgtgtgcctaatgccttctcatactccattgttctgaagggcttatgcgacaatagcatgtgtcagcgggcgctcgagctgctccagatgctggtggaaaaagaaggtgcctgctctctcaatgtagtggcatatagcacagtcatccatggtttctttaaggaaggcgaaaccagcaaggcgtgcaatctattcgatgaaatgatacagcaagggattgtgcctgatgtggtgacatatagctcaattattgatgcgttgtgcaaggccagggcaatggacaaatcagagctagtccttcgtcagatggttgctaatggtgctcaacccaatgaagtgacatataattgcatgatccatggatattccacatctgggcggtggaaagaggctgttaaattgtttagagaaatgaaaagccggggccttataccagatatttttacttgcaactccttaatgacttaccattgcaagcatggaagaagcaaagaagctgcagaatttttttattcgatgacagcaaagggccacaaaccggatatcgtctcataccgtattttgcttcatgggtatgctactgaaggatgctttcctgatatgattgatgtctttaattcaatggaaaacaatggtattgcagccgactgccatgttttcaacatattaattgatgcatattctaaacgtggaatgatggatgaaactatgctgataacaagtaaaatgcaggaacgcagagtgaatcctgatatagtcacctattccagcataatagctggactttccagattgggtaggctgactgaggccatggaaaaattcaatcagatgattgccttgggagtacaaccgaacaaagttgtttatcacgcgttgattcagggtttttgcatagatggtgatttggctaaagctaagcagttggtttctgaaatgatgaacagaggtattcctcgtcctaacatttcgttctttagttcagtaataaagagtctctgccaagaaggaagggttatggatgcacatgatatctttgacttggttatagacatgggtgagaggcctgatgacattttacttaattcactgattgacggatactgcttagtcgggaagatggataaagcattaaaagtacttgatgtcatggaatcagttggtgttgagcctgatgttattacatacaatacacttgttaatggctattgtagaaatggaaggatcaatgatggtttgactctgttcagagatatggcgcgtaagagaattaaacctgacactgtgttcatattgcgtcataatggatgggttgtttcgttctgggagatctgtttctgttatggcgctgctagaaggagggcgcgagagggccggccgggggcctttttgcccacggccgggcaagagggaagggatttccttcttaattcttgcttgattagattgatacatctcctctctttatatagagaggtttacttgactcccaagcaaggcttacttgacccc

SEQ ID NO: 2272 - DNA, 1530 bp, Triticum aestivum; identical to SEQ ID NO: 2271

SEQ ID NO: 2273 - DNA, 1530 bp, Triticum aestivum
atgatgtccgagctcggctgtgtgcctaatgccttctcatactccattgttctgaagggcttatgcgacaatagcatgtgtcagcgggcgctcgagctgctccagatgctggtggaaaaagaaggtgcctgctctctcaatgtagtggcatatagcacagtcatccatggtttctttaaggaaggcgaaaccagcaaggcgtgcaatctattcgatgaaatgatacagcaagggattgtgcctgatgtggtgacatatagctcaattattgatgcgttgtgcaaggccagggcaatggacaaatcagagctagtccttcgtcagatggttgctaatggtgctcaacccaatgaagtgacatataattgcatgatccatggatattccacatctgggcggtggaaagaggctgttaaattgtttagagaaatgaaaagccggggccttataccagatatttttacttgcaactccttaatgacttaccattgcaagcatggaagaagcaaagaagctgcagaatttttttattcgatgacagcaaagggccacaaaccggatatcgtctcataccgtattttgcttcatgggtatgctactgaaggatgctttcctgatatgattgatgtctttaattcaatggaaaacaatggtattgcagccgactgccatgttttcaacatattaattgatgcatattctaaacgtggaatgatggatgaaactatgctgataacaagtaaaatgcaggaacgcagagtgaatcctgatatagtcacctattccagcataatagctggactttccagattgggtaggctgactgaggccatggaaaaattcaatcagatgattgccttgggagtacaaccgaacaaagttgtttatcacgcgttgattcagggtttttgcatagatggtgatttggctaaagctaagcagttggtttctgaaatgatgaacagaggtattcctcgtcctaacatttcgttctttagttcagtaataaagagtctctgccaagaaggaagggttatggatgcacatgatatctttgacttggttatagacatgggtgagaggcctgatgacattttacttaattcactgattgacggatactgcttagtcgggaagatggataaagcattaaaagtacttgatgtcatggaatcagttggtgttgagcctgatgttattacatacaatacacttgttaatggctattgtagaaatggaaggatcaatgatggtttgactctgttcagtgatatgccgcgtaagagaattaaacctgacactgtgttcatattgcgtcataatggatgggttgtttcgttgtgggagatctgtttctgttatggcgctgctagaaggagggcgcgagagggccggccgggggcctttttgcccacggccgggcaagagggaagggatttccttcttaattcttgcttgattagattgatacatctcctctcattatatagagaggtttacttgactcccaagcaaggcttacttgacccc

SEQ ID NO: 2274 - DNA, 1530 bp, Triticum aestivum
atgatgtccgagctcggctgtgtgcctaatgccttctcatactccattgttctgaagggcttatgcgacaatagcatgtgtcagcgggcgctcgagctgctccagatgctggtggaaaaagaaggtgcatgctctctcaatgtagtggcatatagcacagtcatccatggtttctttaaggaaggcgaaaccagcaaggcgtgcaatctattcgatgaaatgatacagcaagggattgtgcctgatgtggtgacatatagctcaattattgatgcgttgtgcaaggccagggcaatggacaaatcagagctagtccttcgtcagatggttgctaatggtgctcaacccaatgaagtgacatataattgcatgatccatggatattccacatctgggcggtggaaagaggctgttaaattgtttagagaaatgaaaagccggggccttataccagatatttttacttgcaactccttaatgacttaccattgcaagcatggaagaagcaaagaagctgcagaatttttttattcgatgacagcaaagggccacaaaccggatatcgtctcataccgtattttgcttcatgggtatgctactgaaggatgctttcctgatatgattgatgtctttaattcaatggaaaacaatggtattgcagccgactgccatgttttcaacatattaattgatgcatattctaaacgtggaatgatggatgaaactatgctgataacaagtaaaatgcaggaacgcagagtgaatcctgatatagtcacctattccagcataatagctggactttccagattgggtaggctgactgaggccatggaaaaattcaatcagatgattgccttgggagtacaaccgaacaaagttgtttatcacgcgttgattcagggtttttgcatagatggtgatttggctaaagctaagcagttggtttctgaaatgatgaacagaggtattcctcgtcctaacatttcgttctttagttcagtaataaagagtctctgccaagaaggaagggttatggatgcacatgatatctttgacttggttatagacatgggtgagaggcctgatgacattttacttaattcactgattgacggatactgcttagtcgggaagatggataaagcattaaaagtacttgatgtcatggaatcagttggtgttgagcctgatgttattacatacaatacacttgttaatggctattgtagaaatggaaggatcaatgatggtttgactctgttcagtgatatgccgcgtaagagaattaaacctgacattgtgttcatattgcgtcataatggatgggttgtttcgttctgggagatctgtttctgttatggcgctgctagaaggagggcgcgagagggccggccgggggcctttttgcccacggccgggcaagagggaagggatttccttcttaattcttgcttgattagattgatacatctcctctcattatatagagaggtttacttgactcccaagcaaggcttacttgacccc

SEQ ID NO: 2275 - DNA, 1530 bp, Triticum aestivum; identical to SEQ ID NO: 2271

SEQ ID NO: 2276 - DNA, 1407 bp, Triticum aestivum
atgtccaacctccgcctcctccgccgcagctcctcctccatgtccaccaccaggtcgccactctcacgggtctggtccccccattcggcctttgccgcggccacagagcgcgtacgcaccgggacgctcagccaagacgatgcacaccacctgttcgacgaattgctgcggcaggccaccccggtccacgagcgctccctcaacagcttcctcgccgccctcgcgcatgctacgtcctctgccgcctgcatcagagatggtcgcgccctcgccatcgccctcttcaaccgcgtgtgtcgagagcaatccggcccgcgggtggtgcctctcacagtccacacgtacaacatcctcatggactgctgctgccgcgcgtctcgcccggacctaggtcttgccttcttcgctcgcctcctcaggacaggcctgaagacaaacgagatcaccgccaacaccttcctcaagtgcctctgctacgcaaaacggacggatgaggctctgaacgtgctgcttcataggatgtccgagctcggctgtgtgcctgatgccatctcatacaacattgttctgaagagcttatgtgaagatagcatgagtcagtgggcgctcgacctcctccagatgatggcgaaagaaggaggtggctgctcccccaacgtggtggcgtatagcacggtcatccatggcttttttaaggaaggtgaaacaggcaaggcatgcaatctgttccatgaaatgatgcaccaaggtgttgagcccagtgtgtggacatatagctcaatcattgatgcattgtgcaaggccagagcaatggacaaggctgagctagtgcttcagcagatggttaacaaaggtgttcaacccaataatgtgacatataattgcatgatccatggatattccacatctgggcagtggaaagaggctgctaaattgcttagagaaatgaaaagccgggaccttataccagatattgtcactcgcaactcgttcctggcctccctttgcaagcatgggagaagcaaggaagctgcagaatttcttgattccatgactgccaagggccacaaaccagatatcgtatcataccgtattttgtttcatgggtgtgccagtgaaggatgcttcgctgatatgattgatctctttaattcaatggaaagcaacggtattgcagctgactgccatgttttcaacatattaattaatggatatgcaaaacgtggaatgacagaagaagctatgctgatatttactgaaatgcggggacaaggagtgagtccagatgtagtcacctattccattgtaatagccgcactttccagaatgggtaggctgaccgatgctattgagaaattcaatgagatgactgccttggaagtacagccggacacaactgtttattgt

SEQ ID NO: 2277 - DNA, 1407 bp, Triticum aestivum; identical to SEQ ID NO: 2276

SEQ ID NO: 2278 - DNA, 1407 bp, Triticum aestivum; identical to SEQ ID NO: 2276

SEQ ID NO: 2279 - DNA, 1407 bp, Triticum aestivum; identical to SEQ ID NO: 2276

SEQ ID NO: 2280 - DNA, 1602 bp, Triticum aestivum
atgagccgccgctttccccctggagctatgagcagacgcatcttggagcggaaaattcaagatcggtaccatgccggacacattggcactcacgacgcactcaacctgttcgacgaattgatccaggttgctgggccttcctcggtccgcgccattaactgcctcctcaccgtcgtcggccgtgattgccctgcgctgggcgtctccctcttcaaccgtgttgcaagagccaaggtgcctccccacaatatcacctatagcattctagtcgattgctgctgccgtgctggccgcttggaccttggacacgctgccatgggacacgttattaagctgggatttgcagcagaagccatcgtcaatttcagccacctactcaaagccatctgcgccgagaagaagaccagctatgcaatggacatcgtactccggataatgcccgagtttaactgcataccggatgttttctcctacagcattcttttcaagggtctctgcaacgagaaaagaagccaagaggctctcgagctgattcacatcatggctgaggatggaggtagctgccaacctaatgtcgtgtcctataacaccgtacttgatggcttgttgaaagagggtgaggtgggcaaggcctacagcctattttgtgtcatgctacagaggggaatttcaccgaatgttgtgacctgcacttcaatcatctctggcatgtgcaaagttcatgcgatggacaaggcagaggaggttcttcaacagatgactaatagaggtattctgccaaatagtgccacatataatagtctgatacatggatattattcattaggacagtgcgaggaggtggatcgaattttcaaagaaatgtccagaaatggtgttcaaccagatattgtaacttataatatacagatggattatctttgcaagagcagaagatgcgcagaagctaggaagatttttgattccatggtcagtttgggccaaaaaccagatgttactacctacagcatactgcttcatgggtatgctatggaaaaatcttttcatgatatgctttgtctcattgatttgatggtaggtaatggtattgcaccaaatcattatgtctacaacatactcatatctgcatatgctaaagaagaaatggttgatgaagtaatgcatatatttagaaaaatgcggcagaaaggattgaaccctgatgcagtgagctatggaacagtaatacacttactttccaggattggtcgaatggatgatgctatgtgccagttcgctcaaatcataactgaagggttagctcctgatatcatagttttcaactcccttattagtggtttctgttcttgtggcaaatgggagaaggttcatgaactattttctgagatgttggattgcggcatctgtcccgacagagtgttcttcaacactgttatggatcacctttgcaaaaatggaagggttatggaagcccaagatgtgttcgacctgatggtacacatgggtgtgaagccttttgtccgtgattacaacacactgatacatggatactgtttagttggtaagatggatgaagggaggaagttacttgacaatatgttc

SEQ ID NO: 2281 - DNA, 1551 bp, Triticum aestivum
atgcgcccatgccggacgcctctcctcgactccacctcgcggctgtccgtgctcctcctcgaccacctccaccgcaatcgcccctcccctccgccctcaccctcgccgccgtcagccttctggtctcccatcgccgcattcgccgctgccacgaagcgcgcccgagccgggacgctcagccctgaggacgcacaccacctgttcgacgaattgctacgccagtccatcccggtccccaaccgcttcctgaacagcttccttgccgccctcgcccgtgccccagcctccgacgcctgcggagatggccccgccctcaccgtcgccctcttcaaccgcctgtgccgagaagaagccggcccttgtgtggcgccgcccactatctataccaacaacattctaatggacagctgctgccgcgtgggtcgcccggaccttgggcttgctgtcttcggccgcctactcaagtcaggcctcaaggcagaccagatcactgccagcagcctcctcatgtgcctctgcgatgtaggacggacaaacgaggctgtggacgttctgcttcataggatctccgagctcggctgtgagcctaatgtcatcccatacaacatagttcttaagagcgtatgtgacagtagaaggagccagcaagctcttgacctgctccagatgatggcacaaagaggttgctgctcccctaatgtggtgtcatataacaccgtcattcatggcttatttaaggaaggtgaagtaagcatggcgtgctcattattctatgaaatgatgcggcaaagggttatgcctaatgtggtgacatatagatcgatgattggtgcgttgtgcaaggtcggggcaacggacaaggcaaagctggtccttggtcatatggttggtaatggttttcaaccagatatgtatacttggaactcattcatggcatctctttgcaagcagggaagaggcaaggaagctgcacaactttttgattacatggtcgccaagggccacaaacctgatgttgtcatgtactccactctgcttcatgggtatgctactgaaggatgcttcactgatatgattaatcactttaattcaatggaaggcaacggtattgtagctaacagccgtgtttttaacatactaatcgacgcatatgctaaacgtggaatgatgcatgaagctatgctcatatttactgaaatgcgggaacgaagagtgagtcctgatatattcacctatggaattataatagctgcactttgcagaatgggtaggctatctgatgctatggagaaaataaatgaaatggttgctacaggattacaaccgaacgaggctgtttactattccctaattcagggtttttgtacacatgatgatttggtcaaagctaaggagttggtttctgagatgatgaccaaaggtattcctcgtcctaacattgtgttcttcaattcggtaatagccagtctgtgcaaagaaggaagggttaaggatgcacacggtatctttgacttggctatgaacattggtgagaggcccgatttaattcac

SEQ ID NO: 2282 - DNA, 1008 bp, Triticum aestivum
atgctgctccacaggatgcccggcgacatgcctgatgtcatctcctactcagtaattatcaagagcttctgtgacaacgggaggagccaacgtgcacttgacctgctccggatgatgaccaaaaagggatctgaccactcccccaatgtggtttcatacacaataatcattggtggattaattaaggagggtgaactaagcaaagcatgcgctctattccatgaaatgatgcagcagggggttgtgcctgatgtggtgacgtatagctccattatcgatgggttgtgcaaagcaagagcattggacgaggcagaggtggtccttcgacaaatgattgatagcggtgttcgaccgaatgctgtgacatacggtagcctgatccatggatattccacttcaggccagtttgaagaggtagttaggttattggaagaaatgagaggtcaaggtgtcgaaccaaatctttttactcacaacacagtcatggactacctttgcaagcatggaagaacgaaagaagctgcagaacttttttattccatggctgagaagggccataaacctaatatggtctcattctctattatgcttcatgggtacgctatagaaggatcccttgctgaaatgactgatctctgtgagctgatggcaagagacggtatcgtacccaacatctgtattttcaacatactgattaatgcatatgctaagtgtggaattatggatgtggctatgcttttcttcgaagacatgttgaagcagggagtgacccctgatgaagtcacatatttagctgtaatagctgggtattgcagaatgggcaggatggatgatgctatcaagaaattcaatgagatgattgatatgggagtaccacatagcttaactatttacaggtgcatgattcatggttattttcgtcatggcaatttcttgaaagcgaaggaattgattactgaaatgaagaacaagggtattcgtccttgtccgcgaaaaaagccaaagaat

SEQ ID NO: 2283 - DNA, 1593 bp, Triticum aestivum
atgaagttcagtgcagttccaagtttggttgagtgtctgacctccgccggtcatccaccctccagtggtttgtcgtcgccgacacgctcccacattcgccactgcaggaaggagcaagacctcccacgtctggcccggttgtcctccagctccggctcctcacaggccaaccagctgctaaacaaactcaaggatcatctgggctctgggatgctcaggccggagctcgcgcaccaactgttcgacaaattgttccctcaaaccgttccagtatcagcagatgcactcaatgtcctattttctgccctcgcgtgtgggctgccctctgccgcctgcaacgatggacctgccctcgccattgctctcttcaaacacatggcacgaacaagatgccgccaggtgatggcacccaccaatcacacttacaacacactaattgagtgctgccacatggcgcgccgccctgacataggccccgccttcttcggcctcctcctcaagacaggcatcatggtagatgtcttcaccttcaacagcttattgaagtgcctctgtgacatgaagcaaacagatgaggctctaggcgtgctgctccacaggatgcccggcgacatgcctgatgtcatctcctactcagtaattatcaagagcttctgtgacaacgggaggagccaacgtgcacttgacctgctccggatgatgaccaaaaaacgatctgaccactcccccaatgtggtttcatacacaataatcattgatggattaattaaggagggtgaactaagcaaagcatgcgctctattccatgaaatgatgcagcagggggttgtgcctgatgtggtgacgtatagctccattatcgatgggttgtgcaaggcaagagcattggacgaggcagatgtggtccttcgacaaatgattgatagcggtgttcgaccgaatgttgtgacatacggtagcctgatccatggatattccacttcaggccagtttgaagaggtagttaggttattggaagaaatgagaggtcagggtgtcgaaccaaatctttttactcacaacacagtcatggactacctttgcaagcatggaagaacgaaagaagctgcagaacttttttattccatggctgagaagggccataaacctaatatggtctcattctctattatgcttcatgggtacgctatagaaggatcccttgctgaaatgactgatctctgtgagctgatggcaagagacagtatcgtacccaacatctgtattttcaacatactgattaatgcatatgctaagtgtggaattatggatgtggctatgcttttcttcgaagacatgttgaagcagggagtgacccctgatgaagtcacatatttagctgtaatagctgggtattgcagaatgggcaggatggatgatgctatcgagaaattcaatgagatgattgatatgggagtaccacatagcttaactatttacaggtgcatcattcatggttattttcgtcatggcaagttcttgaaagcgaaggaattgattactgaaatgaagaacaagggtattcgtccttgtccgcgaaaaaagccaaagaat

SEQ ID NO: 2284 - DNA, 1008 bp, Triticum aestivum; identical to SEQ ID NO: 2282

SEQ ID NO: 2285 - DNA, 1008 bp, Triticum aestivum; identical to SEQ ID NO: 2282

SEQ ID NO: 2286 - DNA, 1008 bp, Triticum aestivum; identical to SEQ ID NO: 2282

SEQ ID NO: 2287 - DNA, 1008 bp, Triticum aestivum; identical to SEQ ID NO: 2282

SEQ ID NO: 2288 - DNA, 1008 bp, Triticum aestivum; identical to SEQ ID NO: 2282

SEQ ID NO: 2289 - DNA, 1509 bp, Triticum aestivum
atgacaaatcggagtgttacaccagatgtgtgtacttacaacttgttgatgacctccctttacaagaatggaaatagcaaagaagctgcacaattgttttattcaatggccacgaagggcctgaaacctgacaccgtttcatatgctattctccttcatgggtatgccactgaaggatgcttggttgacatgatcaatctcttcaattcaatggcaacagactgtattctacctaactgtcatatcttcaacatactgatttatgcatatgctaaatctgggaagcttgataaggctatgcttatatttaaagatatgcagaaacaaggagtgagtccagatgcagtcacatattcaaccgtaatacatgcattttgcaaaaagggtaggttggatgatgctgtgacaaagtttaatcagatgattgatacaggagtacaaccggaagcatctgcttatcgttccctaatccagggtttttgtacacatggcgatttggtgaaagcaaaggaatatgttactgaaatgatgaagaaaggtatgcttcctcctgatattatgttcttcagttcaatcatgcagaaactatgcacagaaggaagggtaatagaagcacgagatatccttgacttgatagtgcgcattggtatgaggcctaatgttttcatatttaatatactgatcggtgggtactgcctaggctgcaagatggaggatgcaacaaaaatgtttgaggatatggtgtcatttggtttagaaccttgtaatattacgtatggtatacttattaatggctattgcaaaagtagaaggattgatgatgggcttattctgttccaagagatgctgcacaagggacttaaacctacaacttttaattataatgtcatactggatgggttatttctggctggacgaactattgctgcaaaggaaaagtttgatgagatggttgaatctggagtaagtgtgtgcactgatacatattcgatagttcttgctggactttgcagaaataattgctttagcgaagtaatcatgctgttccagaagttaagggcaatgaacatgaaattcaatattagaattgtcactatcattattgatgccttctacaaggttcggcgaaaccaagaagctaaggatttgtttgctgcaataccatccaatggtttggtagctaatgttgttacctacagcataatgatgaaaaatcttataaaagaaggttcagtggaagaagctgacactctctttttatcaatggagaagagcggctgtactgcaaactcttggatgttaaatcatattatcagaaggttactggaaagaggagagatagtcaaggctggaaattatatatcgaaagttgatgcaaagagctactcacttgaagctaaaactgtttcgctgctgatctccctcttttcagggaaagggaaatatagagaacacataaaattgctccctatgaagtatcagtttctcgaagaagcagccacagttgaa

SEQ ID NO: 2290 - DNA, 915 bp, Triticum aestivum
atgacaaatcggagtgttacaccagatgtgtgtacttacaacttgttgatgacctccctttacaagaatggaaatagcaaagaagctgcacaattgttctattcaatggccacgaagggcctgaaacctgacaccgtttcatatgctattctccttcatgggtatgccactgaaggatgcttggttgacatgatcaatctcttcaattcaatggcaacagactgtattctacctaactgtcatatcttcaacatactgatttatgcatatgctaaatctgggaagcttgataaggctatgcttatatttaaagatatgcagaaacaaggagtgagtccagatgcagtcacatattcaaccgtaatacatgcattttgcaaaaagggtaggttggatgatgctgtgataaagtttaatcagatgattgatacaggagtacgaccggaagcatctgcttatcgttccctaatccagggtttttgtacacatggcgatttggtgaaagcaaaggaatatgttactgaaatgatgaagaaaggtatgcttcctcctgatattatgttcttcagttcaatcatgcagaaactatgcacagaaggaagggtaatagaagcacgagatatccttgacttgatagtgcgcattggtatgaggcctaatgttttcatgtttaatatactgatcggtgggtactgcctagtctgcaagatggaggatgcaacaaaaatgtttgaggatatggtgtcatttggtttagaaccttgtaatattacgtatggtatacttattaatggctattgcaaaaatagaaggattgatgatgggcttattctgttccaagagatgctgcacaagggacttaaacctacaacttttaattataatgtcatactggatgggttatttctggctgga

SEQ ID NO: 2291 - DNA, 900 bp, Triticum aestivum
atgccccaactgggagttcaacctaatgtggtcatctacacctcaattatcgatgcactaagcaagtgcggagccatggacaaggcagaagtggtccttcagcaaatggttgatcaaggcattgaacccaacatcaggacatatactagcctgatacatggatattcagcttcgggtcagtggaaggcggcagctagagtattcaaggaaatggtaagtgttggtgttctaccaaatgctgtcactttgaactcatttatggattcactttgcaagcatagaaggacaaaggatgctagagatatttttgactccatggctgcaaagggccaaaaacctgacattttctcctactctattatgctaaatgggtatgctaaagaaggatacttcgaggatatgactgatctcttcaatttgatggtactgaatggtattgtacctaaccaccatattttcaacatactgatcaatgcatatgctaaacgtggactgatggatgaggctatgcacatgttcgaagtaatgaggcaacaaggagtaaacccaaatgtagttgactatgtagtagtaatggattcactttgcaaaatgggtaggatggatgctgctctggacaaatttactcagatggtcaatcaaggagtttcacctaacaaagctgtttaccaatgcctggttctgggttcttgctctcatggtcattttgtgaaagccaaggaattgatctctgaagcaattaatagaggtctgttttctaacagtgtgttcttctatcctgtaataaacgacctatgcaaagaaggaaaggtgaaggaggcacaggatatgtttgacttcattctaggtattggtcggcggcctgatgtgattatgtacaattcactgatggatggatat

SEQ ID NO: 2292 - DNA, 900 bp, Triticum aestivum; identical to SEQ ID NO: 2291

SEQ ID NO: 2293 - DNA, 585 bp, Triticum aestivum
atggctgcaaagggccaaaaacctgacattttctcctactctattatgctaaatgggtatgctaaagaaggatacttcgaggatatgactgatctcttcaatttgatggtactgaatggtattgtacctaaccaccatattttcaacatactgatcaatgcatatgctaaacgtggactgatggatgaggctatgcacatgttcgaagtaatgaggcaacaaggagtaaacccaaatgtagttgactatgtagtagtaatggattcactttgcaaaatgggtaggatggatgctgctctggacaaatttactcagatggtcaatcaaggagtttcacctaacaaagctgtttaccaatgcctggttctgggttcttgctctcatggtcattttgtgaaagccaaggaattgatctctgaagcaattaatagaggtctgttttctaacagtgtgttcttctatcctgtaataaacgacctatgcaaagaaggaaaggtgaaggaggcacaggatatgtttgacttcattctaggtattggtcggcggcctgatgtgattatatacaattcactgatggatggatat

SEQ ID NO: 2294 - DNA, 1296 bp, Triticum aestivum
atgacgacgctgctgccaagggtttccaccggtacacgacgaggcgagaggaagggtagcccccgatgccctctcagaaggccaggtggcacccacaggcgccaccgcgccggtgtcggccacagtccggatgtattcacctattcaactctagtatctgcactttgcagaatgggtaagctagctgatgctatggataagttcagtgagatgattggtacgggagtacaaccaggcacagttgtttatcactccctaattcagggtttctgtacacatggcgatttggtgaaagcaaaggagttggtatatgaaatgatgaacaaaggtagtccttgtccaaacattgcattcttcagttcaatagtagacagtctatgcaaagaaggaagggttatggatgcacaccatatctttgacttggttaaagacataggtgagagacctgacatcattatgtttaatacgctgattgacggatattgcctagtcggtgagatggagaaagcatgtggtgtatttgatgccatggtatcagctgtcgttgagcctgatgtcattacctatagtacacttgtcagtggatattgtaaaagtggaaggatcgatgatgggttgaatctgttcacagaaatgttgcataagaaagttaaacctacaactgttacatatggcaccatactggatgggttattttgtgctgggagatctgctgctgcaaagaaagtgttccatgagatgatcgaaagtggaataatggtgagcatttctacatataatataattcttggaggactttgtagaaataattgcgcagatgaagcgattgtcctattccagaaattgtgtgcaatgaatgtgaagttcaatatcacaacactcaataccatgcttaatgcattctacaaggttcaaagaagagaagaagctagtgatttgtttgctgcattaccagccagcgggttggtgcctaatgcttctacttacggagtaatgatacaaaatcttctaaaagaaggagcggtggaagaagctgacagtatgttctcatcaatggagaagagtggttgtgctcctagctctcgttttttaaattatatcatcagaacgttattggaaaaaggggagatagacaaggccggaaaatatatgtctaaagttgatgggaagactattttgcttgaagcttcaactacttcattgctgatgtccctcttttcaaggggaggcaaatatcaggagcacatactcttgctccctgcaaagtatcaactttttagtggagtgaaccacagt

SEQ ID NO: 2295 - DNA, 1296 bp, Triticum aestivum; identical to SEQ ID NO: 2294

SEQ ID NO: 2296 - DNA, 1296 bp, Triticum aestivum; identical to SEQ ID NO: 2294

SEQ ID NO: 2297 - DNA, 1296 bp, Triticum aestivum; identical to SEQ ID NO: 2294

SEQ ID NO: 2298 - DNA, 1248 bp, Triticum aestivum
atgcatatatatgctaaacgaggactgatagatgaagctgtgctcatacttactgaaatgcggggacacggactgagtccggatgtattcacctattcaactctagtatctgcactttgcagaatgggtaagctagctgatgctatggataagttcagtgagatgattggtacgggagtacaaccaggcacagttgtttatcactccctaattcagggtttctgtacacatggcgatttggtgaaagcaaaggagttggtatatgaaatgatgaacaaaggtagtccttgtccaaacattgcattcttcagttcaatagtagacagtctatgcaaagaaggaagggttatggatgcacaccatatctttgacttggttaaagacataggtgagagacctgacatcattatgtttaatacgctgattgacggatattgcctagtcggtgagatggagaaagcatgtggtgtatttgatgccatggtatcggctgtcgttgagcctgatgtcattacctatagtacacttgtcagtggatattgtaaaagtggaaggatcgatgatgggttgaatctgttcacagaaatgttgcataagaaagttaaacctacaactgttacatatggcaccataccggatgggttattttgtgctgggagatctgctgctgcaaagaaagtgttccatgagatgatcgaaagtggaataatggtgagcatttctacatataatataattcttggaggactttgtagaaataattgcgcagatgaagcgatcgtcctattccagaaatcgtgtgcaatgaatgtgaagttcaatatcacaacactcaataccatgcttaatgcattctacaaggttcaaagaagagaagaagctagtgatttgtttgctgcattaccagccagcgggttggtgcctaatgcttctacttacggagtaatgatacaaaatcttctaaaagaaggagcggtggaagaagctgacagtatgttctcatcaatggagaagagtggttgtgctcctagctctcgttttttaaattatatcatcagaacgttattggaaaaaggggagatagacaaggccggaaaatatatgtctaaagttgatgggaagactattttgcttgaagcttcaactacttcattgctgatgtccctcttttcaaggggaggcaaatatcaagagcacatactcttgctccctgcaaagtatcaactttttagtggagtgaaccacagt

SEQ ID NO: 2299 - DNA, 1296 bp, Triticum aestivum; identical to SEQ ID NO: 2294

SEQ ID NO: 2300 - DNA, 1296 bp, Triticum aestivum
atgacgacgctgctgccaagggtttccaccggtacacgacgaggcgagaggaagggtagcccccgatgccctctcagaaggccaggtggcacccacaggcgccaccgcgccggtgtcggccacagtccggatgtattcacctattcaactctagtatctgcactttgcagaatgggtaagctagctgatgctatggataagttcagtgagatgattggtacgggagtacaaccaggcacagttgtttatcactccctaattcagggtttctgtacacatggcgatttggtgaaagcaaaggagttggtatatgaaatgatgaacaaaggtagtccttgtccaaacattgcattcttcagttcaatagtagacagtctatgcaaagaaggaagggttatggatgcacaccatatctttgacttggttaaagacataggtgagagacctgacatcattatgtttaatacgctgattgacggatattgcctagtcggtgagatggagaaagcatgtggtgtatttgatgccatggtatcagctgtcgttgagcctgatgtcattacctatagtacacttgtcagtggatattgtaaaagtggaaggatcgatgatgggttgaatctgttcacagaaatgttgcataagaaagttaaacctacaactgttacatatggcaccatactggatgggttattttgtgctgggagatctgctgctgcaaagaaagtgttccatgagatgatcgaaagtggaataatggtgagcatttctacatataatataattcttggaggactttgtagaaataattgcgcagatgaagcgatcgtcctattccagaaattgtgtgcaatgaatgtgaagttcaatatcacaacactcaataccatgcttaatgcattctacaaggttcaaagaagagaagaagctagtgatttgtttgctgcattaccagccagcgggttggtgcctaatgcttctacttacggagtaatgatacaaaatcttctaaaagaaggagcggtggaagaagctgacagtatgttctcatcaatggagaagagtggttgtgctcctagctctcgttttttaaattatatcatcagaacgttattggaaaaaggggagatagacaaggccggaaaatatatgtctaaagttgatgggaagactattttgcttgaagcttcaactacttcattgctgatgtccctcttttcaaggggaggcaaatatcaggagcacatactcttgctccctgcaaagtatcaactttttagtggagtgaaccacagt

SEQ ID NO: 2301 - DNA, 675 bp, Triticum aestivum
atggtatcgtacggaatggatgaggctatgcacatgttcgaagtaatgaggcaacaaggagtaaacccagatgtatttggctatcaaatcataatggattcactttgtaaaatgggtaagatggatgctgctctggacaaatttaatcagatggtcaatcaaggagtttcacctaacaaagctgtttaccaatgcctggttctgggttcttgctctcatggtgattttgtgaaagccaaggaattgatttctgaagcggttaatagaggtatgtgttctaacagtgtgttcttctatcctgtaataaacgacctttgcaaagaaggaaaggtaaaggaggcacaggatatgtttgacttcatcctaggtattggtcagcggcctgatgtgattatgtacacttcactgatggatggatattgccttgttggcaaggtggagaaagcactgagtgtactcgatgctatgaaatttgctggccttcaacctgatgatgttgtatatggtacacttcttaacagttactgtaaaattggaaggattgccgatggattgagccttttcaggaaatgtcactcagcggggttaagcccacgactattatatacaacattatactggatgggctgttttgctctgggagaacaggttctgcaaaggaaaaattccatacga

SEQ ID NO: 2302 - DNA, 675 bp, Triticum aestivum; identical to SEQ ID NO: 2301

SEQ ID NO: 2303 - DNA, 1410 bp, Triticum aestivum
atggacttcaccgccacggacgtctttcagcactcgccctatggcgatatcctgaattcactaaagtctcyctctttgtcaggagagccctggccgaattgccaggccaagcgctcaaatgaggctttggacatgctgctccaccggacacctgaactacactgtgcgcctgatgtcttctcgtacaacatagtaatcaacggctgcttgaaagaaggtgaagtagacaaagcgtgcaatctcttccatgagatgccccaactgggagttcaacctgatgtggtgacctacacctcaatcatggacgcactaagcaagtccggagcaatggacaaggcagaagtgctccttcggcaaatggttgatcaaggaattgaacccaatatcaagacatatagctatctgatccatggatattctacttttggtcagtggaaggaggcacttagggtattcaaagaaatggcaagtcttggtgttgtaccagacgttgtcacgttgacctcattaatcgattccctttgcaagcacagaaggacaaaggaagctagagaaagttttgactctatggctgcaaagggcctgaaacctaatatcgtctcctactctactatgcttaatggttatgtcaaagaaggatcattcgaggatatgactgatctcttcaattcgatggtacggaatggtatcgtacctaaccaccatattttcaacatactgatcaatgcatatgctaaacgtggaggagtgawgkatgaggctatgcacatgttcgaagtaatgaggcaacaaggagtaaacccggatgtatttgactatcaaatcataatggattcactttgcaaaatgggtaggatggatgctgctctggacaaatttaatcagatggtcaatcaaggagtttcacctaacaaagctgtttaccaatgcctggttctgggttcttgctctcatggtcattttgtgaaagccaaggaattgatttctgaagtggttaatagaggtctgtgttctaacagtgtgttcttctatcctgtaataaacgrcctttgcaaagaaggaaaggtaaaggaggcacaggatatgtttgacttcatcctaggtattggtcagcggcctgatgtgattatgtacacttcactgatggatggatattgccttgttggcaaggtggagaaagcactgagtgtactcgatgctatgaaatttgctggccttcaacctgatgatgttgtatatggtacacttcttaacagttactgtaaaattggaaggattgccgatggattgagccttttcaggaaatgtcactcagcggggttaagcccacgactattatatacaacattatactggatgggctgttttgctctgggagaacaggttctgcaaaggaaaaattccatacga

SEQ ID NO: 2304 - DNA, 675 bp, Triticum aestivum; identical to SEQ ID NO: 2301

SEQ ID NO: 2305 - DNA, 1527 bp, Triticum aestivum
atgggcgaggcggagcttgagccccgaggcggcggcctcggtctgcgtggcgacggcggccgctgcggccgcctgggcggtgtggtggtcgggcctgggcgcggtgctgctgccgtgccgggtgctcgcggtggaggatggggttggctcttcttcggtctgctcggcggccggcggcgtcgtcccggtggccaggggagcaggtccggtgggtggctcctccggcagcgtctccaggcctggcgtggagcggatccggtggtcagggacctacctacacaccaaggccatgcctcgcttctcctccaccacgccaatggcgccaccccgcctccgcctccgactcggctcccgccactcctcctccacctctcatccctcacgcatctgggatccccacgccgccttcgccgccgccgcagaccgcgcgcgctctggcaacctcaccgcggaggacgcacaccacctgttcgacgaattgctgcggcagggcaatcctgtccaggaccgccccctcaacaaacttctctccgccctcgcccgtgctccggcgtccgcggcctgcggcgacggcccgccctcgcggtcgccctcttcagccgcatatcccaaggtgcccgccgacgggtggcagagccaacggcctgcacttacggtatcctcatggactgctgcagccgtgcgtgctgcccggaactggcgcttgccttcttcgcccgtctactgaggtcggggctgagggtaggtgtcatagaagtccgcaccctcctcaagggcctctgccatgcaaagcgggcagaggaggccatggacgtgctgcttcacaggatgcccgagctgggctgcaccccgggcgtggtggcatataacactgtcatcaacggcttctttaaggaaggccaagtaggcaaggcgtgcagtctattccatggaatgccgcagcggggcgttttgcctgatgtagtgacatatacctctgttgtcgatgggctgtgcaaggccagagccatggacaaggcagagtatttccttcgtcagatggttgatagtggtgtcgtacctgataatgtgacatataatagcctcatccatggatattcctctttgggccatcagaaggaggctgttagggtgctgaaagagatgaatcggagggttacaccagatgtcattacctgcacctcactcatggccttcctttgcaagaatggaaaaagcaaggaagctgcagaaatttttgattcaatggccacgaagggcctgaaacatgacgccgtttcatatgctattctccttcatgggtatgccactgaaggatgcttggttgatatgattaatctcttcaattcgatggacagagactgtattctacctgacggtcgtatcttcaacatactgattaatgcatatgctaaatctgggaaccttgataaggctatgcttatatttaaagaaatgcagaaacaaggagtgagtccagatgcagtcacatattcaaccgtaatacatgctttttgcaaaaaaggg

SEQ ID NO: 2306 - DNA, 864 bp, Triticum aestivum
atggactgctgcagccgtgcgtgctgcccggaactggcgcttgccttcttcgcccgtctactgaggtcggggctgagggtaggtgtcatagaagtccgcaccctcctcaagggcctctgccatgcaaagcgggcagaggaggccatggacgtgctgcttcacaggatgcccgagctgggctgcaccccgggcgtggtggcatataacactgtcatcaacggcttctttaaggaaggccaagtaggcaaggcgtgcagtctattccatggaatgccgcagcggggcgttttgcctgatgtagtgacatatacctctgttgtcgatgggctgtgcaaggccagagccatggacaaggcagagtatttccttcgtcagatggttgatagtggtgtcgtacctgataatgtgacatataatagcctcatccatggatattcctctttgggccatcagaaggaggctgttagggtgctgaaagagatgaatcggagggttacaccagatgtcattacctgcacctcactcatggccttcctttgcaagaatggaaaaagcaaggaagctgcagaaatttttgattcaatggccacgaagggcctgaaacatgacgccgtttcatatgctattctccttcatgggtatgccactgaaggatgcttggttgatatgattaatctcttcaattcgatggacagagactgtattctacctgacggtcgtatcttcaacatactgattaatgcatatgctaaatctgggaaccttgataaggctatgcttatatttaaagaaatgcagaaacaaggagtgagtccagatgcagtcacatattcaaccgtaatacatgctttttgcaaaaaaggg

SEQ ID NO: 2307 - DNA, 1527 bp, Triticum aestivum
atgggagaggcggagcttgagccccgaggcggcggcctcggtctgcgtggcgacggcggccgctgcggccgcctgggcggtgtggtggtcgggcctgggcgcggtgctgctgccgtgccgggtgctcgcggtggaggatggggttggctcttcttcggtctgctcggcggccggcggcgtcgtcccggtggccaggggagcaggtccggtgggtggctcctccggcagcgtctccaggcctggcgtggagcggatccggtggtcagggacctacctacacaccaaggccatgcctcgcttctcctccaccacgccaatggcgccaccccgcctccgcctccgactcggctcccgccactcctcctccacctctcatccctcacgcatctgggatccccacgccgccttcgccgccgccgcagaccgcgcgcgctctggcaacctcaccgcggaggacgcacaccacctgttcgacgaattgctgcggcagggcaatcctgtccaggaccgccccctcaacaaacttctctccgccctcgcccgtgctccggcgtccgcggcctgcggcgacggcccgccctcgcggtcgccctcttcagccgcatatcccaaggtgcccgccgacgggtggcagagccaacggcctgcacttacggtatcctcatggactgctgcagccgtgcgtgctgcccggaactggcgcttgccttcttcgcccgtctactgaggtcggggctgagggtaggtgtcatagaagtccgcaccctcctcaagggcctctgccatgcaaagcgggcagaggaggccatggacgtgctgcttcacaggatgcccgagctgggctgcaccccgggcgtggtggcatataacactgtcatcaacggcttctttaaggaaggccaagtaggcaaggcgtgcagtctattccatggaatgccgcagcggggcgttttgcctgatgtagtgacatatacctctgttgtcgatgggctgtgcaaggccagagccatggacaaggcagagtatttccttcgtcagatggttgatagtggtgtcgtacctgataatgtgacatataatagcctcatccatggatattcctctttgggccatcagaaggaggctgttagggtgctgaaagagatgaatcggagggttacaccagatgtcattacctgcacctcactcatggccttcctttgcaagaatggaaaaagcaaggaagctgcagaaatttttgattcaatggccacgaagggcctgaaacatgacgccgtttcatatgctattctccttcatgggtatgccactgaaggatgcttggttgatatgattaatctcttcaattcgatggacagagactgtattctacctgacggtcgtatcttcaacatactgattaatgcatatgctaaatctgggaaccttgataaggctatgcttatatttaaagaaatgcagaaacaaggagtgagtccagatgcagtcacatattcaaccgtaatacatgctttttgcaaaaaaggg

SEQ ID NO: 2308 - DNA, 1527 bp, Triticum aestivum
atgggcgaggcggagcttgagccccgaggcggcggcctcggtctgcgtggcgacggcggccgctgcggccrcctgggcggtgtggtggtcgggcctgggcgcggtgctgctgccgtgccgggtgctcgcggtggaggatggggttggctcttcttcggtctgctcggcggccggcggcgtcgtcccggtggccaggggagcaggtccggtgggtggctcctccggcagcgtctccaggcctggcgtggagcggatccggtggtcagggacctacctacacaccaaggccatgcctcgcttctcctccaccacgccaatggcgccaccccgcctccgcctccgactcggctcccgccactcctcctccacctctcatccctcacgcatctgggatccccacgccgccttcgccgccgccgcagaccgcgcgcgctctggcaacctcaccgcggaggacgcacaccacctgttcgacgaattgctgcggcagggcaatcctgtccaggaccgccccctcaacaaacttctctccgccctcgcccgtgctccggcgtccgcggcctgcggcgacggcccgccctcgcggtcgccctcttcagccgcatatcccaaggtgcccgccgacgggtggcagagccaacggcctgcacttacggtatcctcatggactgctgcagccgtgcgtgctgcccggaactggcgcttgccttcttcgcccgtctactgaggtcggggctgagggtaggtgtcatagaagtccgcaccctcctcaagggcctctgccatgcaaagcgggcagaggaggccatggacgtgctgcttcacaggatgcccgagctgggctgcaccccgggcgtggtggcatataacactgtcatcaacggcttctttaaggaaggccaagtaggcaaggcgtgcagtctattccatggaatgccgcagcggggcgttttgcctgatgtagtgacatatacctctgttgtcgatgggctgtgcaaggccagagccatggacaaggcagagtatttccttcgtcagatggttgatagtggtgtcgtacctgataatgtgacatataatagcctcatccatggatattcctctttgggccatcagaaggaggctgttagggtgctgaaagagatgaatcggagggttacaccagatgtcattacctgcacctcactcatggccttcctttgcaagaatggaaaaagcaaggaagctgcagaaatttttgattcaatggccacgaagggcctgaaacatgacgccgtttcatatgctattctccttcatgggtatgccactgaaggatgcttggttgatatgattaatctcttcaattcgatggacagagactgtattctacctgacggtcgtatcttcaacatactgattaatgcatatgctaaatctgggaaccttgataaggctatgcttatatttaaagaaatgcagaaacaaggagtgagtccagatgcagtcacatattcaaccgtaatacatgctttttgcaaaaaaggg

SEQ ID NO: 2309 - DNA, 1515 bp, Triticum aestivum
atgccacgcgtgcgacccggctcgtcctccagcaccgtctccgcacgcgccaaccagcagctgctaaacaaactcaaggatcatctggactctgggacgctccagccggagcgcgcacaccaactgttcgacaaattgctgcgccaaacggttccggtatcagcgtgcgcactcaatggcttatttgcttccctcgcgcgtgcgctgccctccgctgcctgcaccgacggctctgctctagccattgctctcttcaaccgcatggctcgagagggccgccgggtgatagcacccaacatttacacctacagcatactaattgactgctgctgccgctcgcgccgccctgacctaggtcccgccttcttcggcttcctcctcaagacaggcatcaaggcggacatcatcaccttcaccagcctattcaagtgcctctgtgacatgaagcggatagacgaggctgtgggagtgctgcttcacaggatgcccggagacatgcctgatgtcatctcctactcaacaatcctcaagggcttctgcaatgaggggaggagccagcttgcacttaatctgctccagatgatggtcaaaaaaggagctggccactcacccaacgtggtatcatacaacatggtaatcgatggcttctttaaggagggtgaagtaagcaaagcatgcaatctattccatgaaatgaaacagcggggggtcgtgcctgatgtgtggacatataattccattatcgatgcaatgtgcaaagcaagagcaatggacaaggcaaaattggtcctaagacaaatggttgatagtggggttcaaccggatattgtgacatataataaactgatccatggatattccatttcgggccagtttgaagaggtcgttaggttgttggacaaaatgagaagtcaaggcgtcaaaccaactgtttttacttgcaacacagtcatggactacctttgcaagcatggaagaatcaaagaagctgcagaatttttttattccatggttgagaagggccttaaacctaatatagtctcatatgctattatgtttcgtgggtacgctaaagaaggatcccttgttgaaatgactgatctctgtgagctgatggcaagagatggtattgtacccgatctccattgtttcaacatactgattaatgcatatgctaagtgtgggatgatggatgtggctatttttttcttcaaagacatgttgaagcagggagtgaaccctgatgaagtcacatatttagctgtgatagccgggtattgcagagtgggcatgatggatgatgctatggaaaatttcaatgagatgatcggtatgggagtaccacataacgcaactgtttacaggtgcatgattcagggttacttaaatcatggtgattttttgaaagcaaaggaattgattactgaaatgaagaccaagggtatccatcctagaccgcggaaaagccaagggtacctcatgacgcaactgtttacatcaatggaatgttggtca

SEQ ID NO: 2310 - DNA, 1515 bp, Triticum aestivum; identical to SEQ ID NO: 2309

SEQ ID NO: 2311 - DNA, 1512 bp, Triticum aestivum
atgccacgcgtgcgacccggctcgtcctccagcaccgtctccgcacgcgccaaccagctgctaaacaaactcaaggatcatctggactctgggacgctccagccggagcgcgcacaccaactgttcgacaaattgctgcgccaaaccgttccggtaccagcgtccgcactcaatggcttatttgccgccctcgcgcgtgcgctgccctccgctgcctgcaccgacggccctgctctagccattgctctctttaaccgcatggctcgagagggccgccgggtgatagcacccaacatttacacctacagcatactaattgactgctgctgccgctcgcgccgccctgacctaggtcccgccttcttcggcttcctcctcaagacaggcatcaaggcggacatcatcaccttcaccagcctattcaagtgcctctgtgacatgaagcggatagacgaggctgtgggagtgctgcttcacaggttgcccggagacatgcctgatgtcatctcctactcaacaatcctcaagggcttctgcaatgaggggaggagccagcttgcacttaatctgctccagatgatggtcaaaaaaggagctggccactcacccaacgtggtatcatacaacatggtaatcgatggcttctttaaggagggtgaagtaagcaaagcatgcaatctattccatgaaatgaaacagcggggggtcgtgcctgatgtgtggacatataattccattattgatgcaatgtgcaaagcaagagcaatggacaaggcaaaattggtcctaagacaaatggttgatagtggggttcaaccggatattgtgacatataataaactgatccatggatattccatttcgggccagtttgaagaggtcgttaggttgttggacaaaatgagaagtcaaggcgtcaaaccaactgtttttacttgcaacacagtcatggactacctttgcaagcatggaagaatcaaagaagctgcagaatttttttattccatggttgagaagggccataaacctaatatagtctcatatgctattatgtttcgtgggtacgctaaagaaggatcccttgttgaaatgactgatctctgtgagctgatggcaagagatggtattgtacccgatctccattgtttcaacatactgattaatgcatatgctaagtgtgggatgatggatgtggctattcttttcttcaaagacatgttgaagcagggagtgaaccctgatgaagtcacatatttagctgtgatagccgggtattgcagagtgggcatgatggatgatgctatggaaaatttcaatgagatgatcggtatgggagtaccacataacgcaactgtttacaggtgcatgattcagggttacttaaatcatggtgatttcttgaaagcaaaggaattgattactgaaatgaagaccaagggtatccatcctagaccgcggaaaagccaaggaattgatccagggtacctcatgacgcaactgtttacaggtgca

SEQ ID NO: 2312 - DNA, 1515 bp, Triticum aestivum; identical to SEQ ID NO: 2309

SEQ ID NO: 2313 - DNA, 1515 bp, Triticum aestivum; identical to SEQ ID NO: 2309

SEQ ID NO: 2314 - DNA, 1512 bp, Triticum aestivum; identical to SEQ ID NO: 2311

SEQ ID NO: 2315 - DNA, 1425 bp, Triticum aestivum
atgatgcagcaagggattgtgcctaatgtggtgacatatagctcgattattgatgccttgtgcaaggtcagggcaatggacaaggcaaagctggtccttcagcagatggttgataatggtgttcaaccagatgttgttacttggaactcattcatgtactccttttgcaagcatggaaaaagcaaagaagctgcagaattttttgactccatgaccaccaagggcctcaaacctgatattgtcgcgtactctactcttcttcacgggtatgctactgaaggatgcctagccgatatgattaatctctttaatacaatggaagacaatggtattgtagccaactgcaatgttttcaacatattaattgatgcatatgctaaacgtggaatgatgcatgaagctatgctcatatttaccgaaatgcaggaacaaagagttagtctggatgtgtgcacctatgcaactgtaatagctgcactttgcagaatgggcaggctggctgatgccatggacaaactaaatgagatgattgctatgggattacaaccgaacaaggttgtttatcactctctaattcagggcttttgtacacatagtgatttggtgaaagcaaaggccttggtttctgaaatgatgaacaaaggtattcctcgtccaaacattgtgttcttcagctcagtaataaacagcctatgcaaggaaggaagggttacagatgcacacgatatcttcgacttggctataaacattggtgagaggcctgacgttattacatttaattcactgattgacggatattgtttagccgggaagatggataaagcattcggagtacttgatgccatggtatcagctggcattgagcacaatgttgtcacatacaatacacttgttgatggctattctagaaatggaaggattgatgatgggttgaccctattcagagaaatgacgcgtaacaaaattaaacctacaactgctacatatggcgccatacttcatgggttgtttcgtgctggcagaacttcttctgcgaagaaaatgttcaatgagatgattgaaagtggaacaacagtggacattcccatatatgctataattcttggaggactttgtagaaacaattgcgttgatgaagcaatcatcttgttcgagaaattaggtgcaatgaatgtgaagttggatgttggaatattcaataccatgattaatgcagtgtacacggttaagggaagagaagaagctaaggatttgtttgctgcaatatcagccaattggttggtacctaatgcttcttcttacggtgttatgataacaaatcttctaagagaaggattagtggaagaagctgacaatatgttttcatcaatggacaagagtggttgtgctcctagctctcgtctgttaaatattatcatcagaatg

SEQ ID NO: 2316 - DNA, 1425 bp, Triticum aestivum; identical to SEQ ID NO: 2315

SEQ ID NO: 2317 - DNA, 1425 bp, Triticum aestivum; identical to SEQ ID NO: 2315

SEQ ID NO: 2318 - DNA, 1425 bp, Triticum aestivum; identical to SEQ ID NO: 2315

SEQ ID NO: 2319 - DNA, 1425 bp, Triticum aestivum; identical to SEQ ID NO: 2315

SEQ ID NO: 2320 - DNA, 1425 bp, Triticum aestivum; identical to SEQ ID NO: 2315

SEQ ID NO: 2321 - DNA, 1503 bp, Triticum aestivum
atgctccgccgcatccgcctccgtcgccgcccctacccctcctgcacctacccggagcccgtcctctgccactcctccagctttatctctgcggctcccctcctccgcctccaccagtaccgcaccaccaccacgccgatgtcccgcatccacctccgccgtcgcctcttctcctccaccacgcggccctcgcactcctggtctccacatgccgcctttgccgcagcaacagagcgcgtacgcaccggggcgctcagccaagacgatgcacaccacctgttcgacgaattgctgcggcaggccaccccggtccccgggcgctccctcaacggcttccttgccgccctcgcccgtgcgcccgcctccggagcctgcagagatgggcccgccctcgccctcgctctcttcaaccgcgtctgcctggatgaatccggcgcgcgggtggcaccgcccacaatcttcacctacggcatcctcatgaactgctgctgccgcgcgcatcgcccggacctagggctcgccttcttggctcgcctcctcaggacgggcctgaaggctgaccagatcgtcgccaacaccttcctcaagtgcctctgctgcgcgaaacggacggatgaggctgtgaacgtgctgcttcataggatgccccggctcggctgtgtgcctaatgccttctcatacagcattgttctcaagagcttatgcgataatggcatgagccggcaggcgctcgacctgctccatatgatggcgaaagaaggaggtggctgctcccccaacgtggtggcgtatagcacagtcatccatggcttctttaaggaaggtgaaacaggcaaggcatgcaatctgttccatgaaatgatgcagcaaggtgttgagcccaatgtgtggacatatagttcaatcattgatgcgttgtgcaaggccagagcaatggacaaggcagagctagtgcttgagaagatggttaacaaaggtgttcaacccaataatgtgacatataattgcatgatccatggatattccacatcagggcagttgaaagaggctgctaaaatgttcagagaaatgacaagtcagggtcttataccagataactttacttgcagctccttaatgacttacctttgtaagcatggaagaagcaaagaagctgcagaattttttgatgccatgactgccaaaggccacagagatgtcatctcctactgcattttgcttcatgggtatgccaatgaaggatgctttgctgatatgattgatctctttaattcaatgcaaagaaacggtattgctgccaactgccatgttttcaacatattaattaatggatatgctaaacgtggaatgacggatgaagctatgctgatatttacagaaatgtgggaaaaaggagtgagtcccgatgtagtcacctattccactgtaatagctgcactttccaggatgggggggttgaccgacgctatggaaaaatttaatcagatgattgccatgggaatt

SEQ ID NO: 2322 - DNA, 1470 bp, Triticum aestivum
atgtggtggcgtatagcacggtcatccatggcttttttaaggagggtgaaacagggaaggcatgcagtctattccatgacagccaagggccaaaaacctgatatcatctcgtattgtactttgcttcatgggyatgccartgaaggatgctttrctgatatgattgatctctttaattcaatgaaaagcaacggtattgcagctgactgccgtgtttttaccatattaattgatgcctatgctaaacgtggaatgatggatgatgcaatgcacatatttacggaaatgtgggaaaaaggagtgagtcccgatgtggttacctattccactgtaatagctgcactttccaggatgggtagattgaccgatgctatggacaaatttaatcagatgatttccatgggggttcaaccgaacacagttgtttatcacaccctaattcagggctcttgtatgcatggtgatttgattaaagccaaggagctggtttctgaaatgatgaacaaaggtattcctcgtcctagcattgcgttcttcggttcaataataaacaggttatgcaaagatggaagggttatggatgcacatgatatctttgacttggttatagacataggcgagaggcctagtgtcattacatttaattcactggttgacggatattgcttagtcggcaagatggataaagcatttggaatgcttaatgccatggaatcagttggtgttgagcctgatattgttacttacagtacacttcttgatggctattttaaaaatggaaggatcaatgatggtttgactctgtttagagaaatgccgcttaagagaattaaacctgacactgttacatatggcatcatgttggatgggtgttttcgtgctgggagaactgttgctgcaaggacaatgttccatgagatgatcgaaagtggaataacagtggacatccccacatataatatagttcttaggggactttgtagaaataactgcacagatgaagcaatcgccctgttccagaaattaggtgcaatgagtatgaagttcaatattgcaatactcaataccatgatcaatgcaatctacaaggttcggagaagagaagaagctaacaatttgtttgctgcaatatcagccagtgggttggtgcccaatcaatctacttatgctgtaatgataataaatcttctaaaagatggagcagtggaacatgctagcaatatgttttcatcaatggagaaaagtggtattgtccccagctcccgtcttataaatggtatcatcagattgttgttggagaatggtgagattgccaaggctggaatttatttgtctaaagttgatgggaatagcatctcacttgaagcttcaactacttcattgatgttgtctctgttttcaaggaaagggaaatatcaggaggacatgaagttgctccctgcaaagtatcaattttttggtgaatttggc

SEQ ID NO: 2323 - DNA, 1509 bp, Triticum aestivum
atgccacgcgtccgacccggctcgtcctccagcaccgtctcctcacgcgccaaccagctgctaaacaaactcaaggatcatctgggctctgggacgctccagccggagcgcgcacaccaactgttcgacaaattgctgcgccaaaccgttccggtatcagcgttcgcactcaatggcttatttgccgccctcgcgcgtgcgctgccctccgctgcctgcaccgacggccctgctctagccattgctctcttcaaccgcatggctcgagagggccgccgggtgatagagcccaacatttacacctacaacatactaattgactgctgctgccgctcgcgccaccctgacctaggtcccgccttcttcggcttcctcctcaagacaggcatcaaggcggacatcatcaccttcaacagcctattgaagtgcctctgtgacatgatgcagatggaggaggccctcaacatgctgctctacaggatgcctgagctgcctgatagcatctcctactcaataattattaagagcttatgtgacaatgggaggagccaatgtgcacttgacctgctccggatgaaggccaaaaagggagctgaccactaccctggattggtggcatacaacagggtaatcaatggcttaattaaggagggtgaactaagcaaagcatgctctctattccatgaaatgatgcagcagggggtcgtgcctaatgtggtgacgtatagctccattatcgatgcattgtgcaaagcaggagcaatggacaaggcagaggtggcccttcgacaaatggttggtaatggtgttcgaccggatatttttacatatactagcctgatccatggatattccatttcaggccagtttgaagaggtcgttaggttgttggaaaaattgagaagtcaaggtgtcaaaccaactgtttttacctgcaacacagtcatggactacctttgcaagcatggaaaaatcaaagaagctgcagaatttttttattccatgcctgagaagggccataaacctaatatagtgtcatactctattatgctttatgggtacgctaaagaaggatcccttgttgaaatgactgatctctgtgagctgatggcaagagacggtattgtacccgatctccattgtttaaacatactgattaatgcatatgctaagtgtggaatgatggatgtagctatgcttttcttcaaagacatgttgaagcagggagtgaaccctgatgaagtcacatatttagctgtgataaccgggtattgcagagtgggcatgatggatgatgctatggaaaaattcaatgagatgatcgatatgggagtaccacgtaactcaactgtttacaggtgcatgattcagggttacttaaatcatggtgatttcttgaaagcaaaggtattgactactgaaatgaagaccaagggtatccatcctagaccacggaaaagccaaagaattgattcagggtacctcatgacacaactatttacaggtgca

SEQ ID NO: 2324 - DNA, 1509 bp, Triticum aestivum
atgccacgcgtccgacccggctcgtcctccagcaccgtctcctcacgcgccaaccagctgctaaacaaactcaaggatcatctgggctctgggacgctccagccggagcgcgcacaccaactgttcgacaaattgctgcgccaaaccgttccggtatcagcgttcgcactcaatggcttatttgccgccctcgcgcgtgcgctgccctccgctgcctgcaccgacggccctgctctagccattgctctcttcaaccgcatggctcgagagggccgccgggtgatagagcccaacatttacacctacaacatactaattgactgctgctgccgctcgcgccaccctgacctaggtcccgccttcttcggcttcctcctcaagacaggcatcaaggcggacatcatcaccttcaacagcctattgaagtgcctctgtgacatgatgcagatggaggaggccctcaacatgctgctctacaggatgcctgagctgcctgatagcatctcctactcaataattattaagagcttatgtgacaatgggaggagccaatgtgcacttgacctgctccggatgaaggccaaaaagggagctgaccactaccctggattggtggcatacaacagggtaatcaatggcttaattaaggagggtgaactaagcaaagcatgctctctattccatgaaatgatgcagcagggggtcgtgcctaatgtggtgacgtatagctccattatcgatgcattgtgcaaagcaggagcaatggacaaggcagaggtggcccttcgacaaatggttggtaatggtgttcgaccggatatttttacatatactagcctgatccatggatattccatttcaggccagtttgaagaggtcgttaggttgttggaaaaattgagaagtcaaggtgtcaaaccaactgtttttacttgcaacacagtcatggactacctttgcaagcatggaaaaatcaaagaagctgcagaatttttttattccatgcctgagaagggccataaacctaatatagtgtcatactctattatgctttatgggtacgctaaagaaggatcccttgttgaaatgactgatctctgtgagctgatggcaagagacggtattgtacccgatctccattgtttaaacatactgattaatgcatatgctaagtgtggaatgatggatgtagctatgcttttcttcaaagacatgttgaagcagggagtgaaccctgatgaagtcacatatttagctgtgataaccgggtattgcagagtgggcatgatggatgatgctatggaaaaattcaatgagatgatcgatatgggagtaccacataactcaactgtttacaggtgcatgattcagggttacttaaatcatggtgatttcttgaaagcaaaggtattgactactgaaatgaagaccaagggtatccatcctagaccacggaaaagccaaagaattgattcagggtacctcatgacacaactatttacaggtgca

SEQ ID NO: 2325 - DNA, 1509 bp, Triticum aestivum; identical to SEQ ID NO: 2324

SEQ ID NO: 2326 - DNA, 1509 bp, Triticum aestivum; identical to SEQ ID NO: 2324

SEQ ID NO: 2327 - DNA, 1509 bp, Triticum aestivum; identical to SEQ ID NO: 2324

SEQ ID NO: 2328 - DNA, 1509 bp, Triticum aestivum; identical to SEQ ID NO: 2323

SEQ ID NO: 2329 - DNA, 909 bp, Triticum aestivum
atggactgctgctgccgcgcgcgtcgcccggacctagggctcgccttattcggccgcttcctcgggacaggcctgaggacaaacgagatcgtcgccaccaccttcctcaagtgcctctgctgcgcgaaacggacagaagaggttgtgaaagtactgcttcacagaatgcccgagctgggctgtgtgcctaatgccatctcgtactccatagttttgaaaagcttgtgtgaaaatagcatgagtcagcaggcactcgacctgctccagatggtagggaaagaaggaggctgccttcgtgatgtggtggcatataacacaatcatccatggcttctttaaggagggcggaatagacaaggcatgccatctattccatgaaatgatgcggcaaggggttgtgccgactgtggtgacatacaacacagtaattgatgcgttgtgcaaggccggagaaatggacaaggcagagctagtctttcagcagatggctcgtaatggtgcgcagcccaataaagtgacatgtaatggcagtaaatttagttcactgactgacggatattgctcagtcggcaagatggataaaacattcaaactgcttgatgccatggtatcagttggaattgagcctgatgctgttacttatagtgcacttcttgatggctattttaaaaatggaaggatcgatgatggtttgactctatttagagaaatgtcgtgcaagggagttaaaccaacaactgtgacatatggcatcatactggatggtttatatcgtgctgggagaactgctgctgccaagaaaatgtttgatcagatgatcaaaagtggaataacagtgaccgtttccatatacactactccctcctttccggtttataaggcgtatttcaacttttttgtttttccaatt

SEQ ID NO: 2330 - DNA, 909 bp, Triticum aestivum; identical to SEQ ID NO: 2329

SEQ ID NO: 2331 - DNA, 909 bp, Triticum aestivum
atggactgctgctgccgcgcgcgtcgcccggacctagggctcgccttattcggccgcttcctcgggacaggcctgaggacaaacgagatcgtcgccaccaccttcctcaagtgcctctgctgcgcgaaacggacagaagaggttgtgaaagtactgcttcacagaatgcccgagctgggctgtgtgcctaatgccatctcgtactccatagttttgaaaagcttgtgtgaaaatagcatgagtcagcaggcactcgacctgctccagatggtagggaaagaaggaggctgccttcgtgatgtggtggcatataacacaatcatccatggcttctttaaggagggcggaatagacaaggcatgccatctattccatgaaatgatgcggcaaggggttgtgccgactgtggtgacatacaacacagtaattgatgcgttgtgcaaggccggagaaatggacaaggcagagctagtctttcagcggatggctcgtaatggtgcgcagcccaataaagtgacatgtaatggcagtaaatttagttcactgactgacggatattgctcagtcggcaagatggataaaacattcaaactgcttgatgccatggtatcagttggaattgagcctgatgctgttacttatagtgcacttcttgatggctattttaaaaatggaaggatcgatgatggtttgactctatttagagaaatgtcgtgcaagggagttaaaccaacaactgtgacatatggcatcatactggatggtttatatcgtgctgggagaactgctgctgccaagaaaatgtttgatcagatgatcaaaagtggaataacagtgaccgtttccatatacactactccctcctttccggtttataaggcgtatttcaacttttttgtttttccaatt

SEQ ID NO: 2332 - DNA, 909 bp, Triticum aestivum; identical to SEQ ID NO: 2329

SEQ ID NO: 2333 - DNA, 1512 bp, Triticum aestivum
atgccaaatgcaaatggtgtgaagatgtttgttatttcacggtacacagttgtgctcacttttcttgtcaatttcagccacctactcaaggccatctgtgcggagaagaagaccagctatgcaatggacatcgtactccgagtaatgcccgagtttaactatgttccgaacattttctcctataacattcttttcaagggtctctgcaacgagaagagaagccaagaggctctcgagctgattcaaattatggttgaggatggaggtggctgccgacctgatgtggtgacctatagcactgtaattgatggcttgttgaaagagggtgaggtggaccaagcttacagcctattttctgaaatgctgcgtcagggggtatcaccgaatattgtgacctgtaattcaatcatctctggcatgtgcaagcttcacgcgatggacaaggctgaggaggttcttcaacagatgcttgatagacgaattctgccagatgttaccacatatactagtctaatacatggatattattcattaggacagtgcgaggaggtggatcgggttttcaaagaaatgtctagaaatggtgttcaaccaaatattataacttatagtatacagatggattatctttgcaagaatggaagatgcacagaagctaggaagatttttgattctatggtcagtttgggccaaaaaccagatgttactacctacagcattctgcttcatgggtatgctatggaacgatcttttcatgatattcattgtctcattgatttgatggtcgaaaatggtctgtcaccaaataactatatctacaacatactcatatctgcatgtgctaaagaaaaaatggttgatgaggcgatgcatatatttacaaaaatgcggcagcaaggattgaaccctgatgcagtgagctacggaacagtaatagacttgctttccagttttggccgaatggatgatgctatgtccctattcaataaaatgataactgaaggattagctcctggtatcatagttttcaaccaccttattagtggtttttgtacttgtggcaaatgggtgaaggttcatgaactattttctgagatgttggatcgcggcatctgtcccaacacagtgttcttcaacacaattatggatcgcctttgcaaaaatggaagggttatggatgcccaagatctcttcgacctaatgatacacatgggtgtgaagcctgatgtgtgtacttatagcacactgataggtggatacttgttcgttggtaagatggatgaagtgaggaagttactagaaaatatgtgctcaattggcttgaaaccagatgttgtcacctatagcatactgatagatggttactctaagaatggaaggatagatgatgcactggttgttatcagggaaatggacggtgttaagccttctattatcacttttaatattatgattggtgtgttgcttaaaggtagcagaatggaagaagccaaagatttgtttgacggtatc

SEQ ID NO: 2334 - DNA, 1512 bp, Triticum aestivum
  misc_feature (611)..(611): n is a, c, g, or t
  misc_feature (1070)..(1070): n is a, c, g, or t
atgccaaatgcaaatggtgtgaagatgtttgttatttcacggtacacagttgtgctcacttttcttgtcaatttcagccacctactcaaggccatctgtgcggagaagaagaccagctatgcaatggacatcgtactccgagtaatgcccgagtttaactgtgttccgaacattttctcctataacattcttttcaagggtctctgcaacgagaagagaagccaagaggctctcgagctgattcaaattatggttgaggatggaggtggctgccgacctgatgtggtgacctatagcactgtaattgatggcttgttgaaagagggtgaggtggaccaagcttacagcctattttctgaaatgctgcgtcagggggtatcaccgaatattgtgacctgtaattcaatcatctctggcatgtgcaagcttcacgcgatggacaaggctgaggaggttcttcaacagatgcttgatagacgaattctgccagatgttaccacatatactagtctaatacatggatattattcattaggacagtgcgaggaggtggatcgggttttcaaagaaatgtctagaaatggtgttcaaccaaatattataacttatantatacagatggattatctttgcaagaatggaagatgcacagaagctaggaagatttttgattctatggtcagtttgggccaaaaaccagatgttactacctacagcattctgcttcatgggtatgctatggaacgatcttttcatgatattcattgtctcattgatttgatggtcgaaaatggtctgtcaccaaataactatatctacaacatactcatatctgcatgtgctaaagaaaaaatggttgatgaggcgatgcatatatttacaaaaatgcggcagcaaggattgaaccctgatgcagtgagctacggaacagtaatagacttgctttccagttttggccgaatggatgatgctatgtccctattcaataaaatgataactgaaggattagctcctggtatcatagttttcaaccaccttattagtggtttttgtacttgtggcaaatgggngaaggttcatgaactattttctgagatgttggatcgcggcatctgtcccaacacagtgttcttcaacacaattatggatcgcctttgcaaaaatggaagggttatggatgcccaagatctcttcgacctaatgatacacatgggtgtgaagcctgatgtgtgtacttatagcacactgataggtggatacttgttcgttggtaagatggatgaagtgaggaagttactagaaaatatgtgctcaattggcttgaaaccagatgttgtcacctatagcatactgatagatggttactctaagaatggaaggatagatgatgcactggttgttatcagggaaatggacggtgttaagccttctattatcacttttaatattatgattggtgtgttgcttaaaggtagcagaatggaagaagccaaagatttgtttgacggtatc

SEQ ID NO: 2335 - DNA, 1512 bp, Triticum aestivum
atgccaaatgcaaatggtgtgaagatgtttgttatttcacggtacacagttgtgctcacttttcttgtcaatttcagccacctactcaaggccatctgtgcggagaagaagaccagctatgcaatggacatcgtactccgagtaatgcccgagtttaactgtgttccgaacattttctcctataacattcttttcaagggtctctgcaacgagaagagaagccaagaggctctcgagctgattcaaattatggttgaggatggaggtggctgccgacctgatgtggtgacctatagcactgtaattgatggcttgttgaaagagggtgaggtggaccaagcttacagcctattttctgaaatgctgcgtcagggggtatcaccgaatattgtgacctgtaattcaatcatctctggcatgtgcaagcttcacgcgatggacaaggctgaggaggttcttcaacagatgcttgatagacgaattctgccagatgttaccacatatactagtctaatacatggatattattcattaggacagtgcgaggaggtggatcgggttttcaaagaaatgtctagaaatggtgttcaaccaaatattataacttatattatacagatggattatctttgcaagaatggaagatgcacagaagctaggaagatttttgattctatggtcagtttgggccaaaaaccagatgttactacctacagcattctgcttcatgggtatgctatggaacgatcttttcatgatattcattgtctcattgatttgatggtcgaaaatggtctgtcaccaaataactatatctacaacatactcatatctgcatgtgctaaagaaaaaatggttgatgaggcgatgcatatatttacaaaaatgcggcagcaaggattgaaccctgatgcagtgagctacggaacagtaatagacttgctttccagttttggccgaatggatgatgctatgtccctattcaataaaatgataactgaaggattagctcctggtatcatagttttcaaccaccttattagtggtttttgtacttgtggcaaatgggagaaggttcatgaactattttctgagatgttggatcgcggcatctgtcccaacacagtgttcttcaacacaattatggatcgcctttgcaaaaatggaagggttatggatgcccaagatctcttcgacctaatgatacacatgggtgtgaagcctgatgtgtgtacttatagcacactgataggtggatacttgttcgttggtaagatggatgaagtgaggaagttactagaaaatatgtgctcaattggcttgaaaccagatgttgtcacctatagcatactgatagatggttactctaagaatggaaggatagatgatgcactggttgttatcagggaaatggacggtgttaagccttctattatcacttttaatattatgattggtgtgttgcttaaaggtagcagaatggaagaagccaaagatttgtttgacggtatc

SEQ ID NO: 2336 - DNA, 1077 bp, Triticum aestivum
atggacaaggctgaggaggatcttcaacagatgcatgatagacgaattctgccagatgttaccacatatactagtctaatacatggatattattcattaggacagtgcgaggaggtggatcgggttttcaaagaaatgtctagaaatggtgttcaaccaaatattataacttatagtatacagatggattatctttgcaagaatggaagatgcacagaagctaggaagatttttgattctatggtcagtttgggccaaaaaccagatgttactacctacagcattctgcttcatgggtatgctatggaacgatcttttcatgatattcattgtctcattgatttgatggtcgaaaatggtctgtcaccaaataactatatctacaacatactcatatctgcatgtgctaaagaaaaaatggttgatgaggcgatgcatatatttacaaaaatgcggcagcaaggattgaaccctgatgcagtgagctacggaacagtaatagacttgctttccagttttggccgaatggatgatgctatgtccctattcaataaaatgataactgaaggattagctcctggtatcatagttttcaaccaccttattagtggtttttgtacttgtggcaaatgggtgaaggttcatgaactattttctgagatgttggatcgcggcatctgtcccaacacagtgttcttcaacacaattatggatcgcctttgcaaaaatggaagggttatggatgcccaagatctcttcgacctaatgatacacatgggtgtgaagcctgatgtgtgtacttatagcacactgataggtggatacttgttcgttggtaagatggatgaagtgaggaagttactagaaaatatgtgctcaattggcttgaaaccagatgttgtcacctatagcatactgatagatggttactctaagaatggaaggatagatgatgcactggttgttatcagggaaatggacggtgttaagccttctattatcacttttaatattatgattggtgtgttgcttaaaggtagcagaatggaagaagccaaagatttgtttgacggtatc

SEQ ID NO: 2337 - DNA, 1512 bp, Triticum aestivum
atgccaaatgcaaatggtgtgaagatgtttgttatttcacggtacacagttgtgctcacttttcttgtcaatttcagccacctactcaaggccatctgtgcggagaagaagaccagctatgcaatggacatcgtactccgagtaatgcccgagtttaactgtgttccgaacattttctcctataacattcttttcaagggtctctgcaacgagaagagaagccaagaggctctcgagctgattcaaattatggttgaggatggaggtggctgccgacctgatgtggtgacctatagcactgtaattgatggcttgttgaaagagggtgaggtggaccaagcttacagcctattttctgaaatgctgcgtcagggggtatcaccgaatattgtgacctgtaattcaatcatctctggcatgtgcaagcttcacgcgatggacaaggctgaggaggttcttcaacagatgcttgatagacgaattctgccagatgttaccacatatactagtctaatacatggatattattcattaggacagtgcgaggaggtggatcgggttttcaaagaaatgtctagaaatggtgttcaaccaaatattataacttataktatacagatggattatctttgcaagaatggaagatgcacagaagctaggaagatttttgattctatggtcagtttgggccaaaaaccagatgttactacctacagcattctgcttcatgggtatgctatggaacgatcttttcatgatattcattgtctcattgatttgatggtcgaaaatggtctgtcaccaaataactatatctacaacatactcatatctgcatgtgctaaagaaaaaatggttgatgaggcgatgcatatatttacaaaaatgcggcagcaaggattgaaccctgatgcagtgagctacggaacagtaatagacttgctttccagttttggccgaatggatgatgctatgtccctattcaataaaatgataactgaaggattagctcctggtatcatagttttcaaccaccttattagtggtttttgtacttgtggcaaatgggagaaggttcatgaactattttctgagatgttggatcgcggcatctgtcccaacacagtgttcttcaacacaattatggatcgcctttgcaaaaatggaagggttatggatgcccaagatctcttcgacctaatgatacacatgggtgtgaagcctgatgtgtgtacttatagcacactgataggtggatacttgttcgttggtaagatggatgaagtgaggaagttactagaaaatatgtgctcaattggcttgaaaccagatgttgtcacctatagcatactgatagatggttactctaagaatggaaggatagatgatgcactggttgttatcagggaaatggacggtgttaagccttctattatcacttttaatattatgattggtgtgttgcttaaaggtagcagaatggaagaagccaaagatttgtttgacggtatc

SEQ ID NO: 2338 - DNA, 1512 bp, Triticum aestivum
atgccaaatgcaaatggtgtgaagatgtttgttatttcacggtacacagttgtgctcacttttcttgtcaatttcagccacctactcaaggccatctgtgcggagaagaagaccagctatgcaatggacatcgtactccgagtaatgcccgagtttaactgtgttccgaacattttctcctataacattcttttcaagggtctctgcaacgagaagagaagccaagaggctctcgagctgattcaaattatggttgaggatggaggtggctgccgacctgatgtggtgacctatagcactgtaattgatggcttgttgaaagagggtgaggtggaccaagcttacagcctattttctgaaatgctgcgtcagggggtatcaccgaatattgtgacctgtaattcaatcatctctggcatgtgcaagcttcacgcgatggacaaggctgaggaggttcttcaacagatgcttgatagacgaattctgccagatgttaccacatatactagtctaatacatggatattattcattaggacagtgcgaggaggtggatcgggttttcaaagaaatgtctagaaatggtgttcaaccaaatattataacttatagtatacagatggattatctttgcaagaatggaagatgcacagaagctaggaagatttttgattctatggtcagtttgggccaaaaaccagatgttactacctacagcattctgcttcatgggtatgctatggaacgatcttttcatgatattcattgtctcattgatttgatggtcgaaaatggtctgtcaccaaataactatatctacaacatactcatatctgcatgtgctaaagaaaaaatggttgatgaggcgatgcatatatttacaaaaatgcggcagcaaggattgaaccctgatgcagtgagctacggaacagtaatagacttgctttccagttttggccgaatggatgatgctatgtccctattcaataaaatgataactgaaggattagctcctggtatcatagttttcaaccaccttattagtggtttttgtacttgtggcaaatgggtgaaggttcatgaactattttctgagatgttggatcgcggcatctgtcccaacacagtgttcttcaacacaattatggatcgcctttgcaaaaatggaagggttatggatgcccaagatctcttcgacctaatgatacacatgggtgtgaagcctgatgtgtgtacttatagcacactgataggtggatacttgttcgttggtaagatggatgaagtgaggaagttactagaaaatatgtgctcaattggcttgaaaccagatgttgtcacctatagcatactgatagatggttactctaagaatggaaggatagatgatgcactggttgttatcagggaaatggacggtgttaagccttctattatcacttttaatattatgattggtgtgttgcttaaaggtagcagaatggaagaagccaaagatttgtttgacggtatc

SEQ ID NO: 2339 - DNA, 1209 bp, Triticum aestivum
atgtcacactctttctccagctccgtttcctcatgcgccaacgagctgctgaacgaactccacgaccatctgggcttcaggacgctcaggccagagctcgcgcaccaactgttcgatgaaatgctacgccaaccagtcccagtatcagtacgtgcactcaacgacttatttgttgcccttgcgcgtgcgccgccctccaccatctgcaccgacggacctgccctcgccattgatctcttcaaccgcatggcccaagcaggccgtcgccaggtgatagcacccaccattatcacctacaacatactaattgactgctgccaccgagcatgccgcccggacctagggcatgccttcttcggtcgcctcctcaagacaggcatcacaatgagcgtcattacctacaacagcctattcatgtgcctctgtgacatgaggcgaacaaaggaggctctgaacatgctgctccataggatgcccgatgacttgcctaatgtcatctcctactcagtgattctcaagagtttcagcgacagtgggaggagccagcttgcgcttgacctgctccaaatgatggccaaaaaaggtgctgaccactcccccgacgtgatgtcatacaacatagtaattgatggcttttttaaagagggtgaagtaagcaaagcatgcgatctattccaagaaatgatacgacaggggattgtgcctactaaggtgacatatatctccattatcaatgcgctgtgcaaagcaagagcaatggacaaggtagaggtggttcttcgatcaatggttcataatggtgtccaaccagaagctgtgacatatagtagcatgatccaaggatattcaactttgggccagttgaaagaagttgctaggttgttgcaagtaatgagaagccaatgttgtatgccaaatgttgttacttgcagctcagtcatggattacctttgcaagcatggaagaatcaaagaagccgaggaaatattttattccatggccgtgaatggacgaaaacctaatgtcatctcatactctattatgctccatgggtacgctatagaaggaacccttattaaaatgattgatctctgtgagctgatggcaagagatggagttgtacccgacctccgttgtttcaacatactgattaatgcatatgctaagtatggcatgatggatgtggccatgcttttctttgaagacatg

SEQ ID NO: 2340 - DNA, 1209 bp, Triticum aestivum; identical to SEQ ID NO: 2339

SEQ ID NO: 2341 - DNA, 1209 bp, Triticum aestivum; identical to SEQ ID NO: 2339

SEQ ID NO: 2342 - DNA, 1209 bp, Triticum aestivum; identical to SEQ ID NO: 2339

SEQ ID NO: 2343 - DNA, 1209 bp, Triticum aestivum; identical to SEQ ID NO: 2339

SEQ ID NO: 2344 - DNA, 1209 bp, Triticum aestivum; identical to SEQ ID NO: 2339

SEQ ID NO: 2345 - DNA, 1443 bp, Triticum aestivum
atgtgcaaggttcatgcaatggacaaggctgaggaggttcttcaacagatgcttgatagaagaattctgccagatgctgccacatataatagtctgatacatggatattatttattaggacagtgcgaagaggtggatcgggttctcaaggaaatgtgtagaaagagtgttcaaccaaatattgtaacttactatatacagatggattatctttgcaagagcggaaggtgcgcagaagctaggaaaatatttgattctatgatcggtttgggccaaaaaccagatgttactacctacagtattctactgcatgggtatgctatggaaaaatcttttcatgagatgcattgtctcattgatttgatggtagaaaatggtattgcaccagatcatcatgtctacaacatactcatatctgcatatgctaaagaagaaagggttggtgaggtagtgcatatatttacaaaaatgcggcagcaaggattgaaccctaatgtagcgaactatggagtggttgtaaacttgctttgcagcatgggccgaatggatgatgctatgtcccaatacaatcaaatgataactgaaggattactccctggtatcatacttttcagccaacttattagtggtttctgtacttgtggcaaatgggagaaggttcatgaactattttctgagatgttggatcgtggcatctatcccgacactgtgttcttcaacacaattatggatcatctttgcaaaaatggaagggttatggaagcccaggatctcttcgacctgatggtacacatgggtgtgaaacctgacgtgtgtacttatagcacactgataggtggatacttgttcgttggtaagatggatgaagtgagcaagttacttgacaatatggtctcaattggcatggatccagatgttatcacctatagcatactgattgatggttactgtaagaatggaaggatagatgatgcattggttgttttcagggaaatgttggccgggaaggttaagccttgcattatcacttttaatattatgattggtgcgttgcttaaaggtggcagaaaggaagaggctaaagatttgtttgatggtatctgggccaaaggattagtgcccaccgttgttacatatagcttaatgatacaaaaacttatagaagaaggttctctacaggagtctgatgatctattcctttctatggagaagaatggttgtcctgccaattcccgcatgctaaatgctatagttagaaggttacttcagaaaggggagatgcccagggctgggacttatttgtctaaaattgatgagaggaatttcacccttgaagcttccacaactagcttgttgactgcacttgcttcagtggggaaatgtcaggaatataaggggttactgcctgaaaaatatcactcttttctggaacaaggcactgat

SEQ ID NO: 2346 - DNA, 1443 bp, Triticum aestivum; identical to SEQ ID NO: 2345

SEQ ID NO: 2347 - DNA, 1443 bp, Triticum aestivum; identical to SEQ ID NO: 2345

SEQ ID NO: 2348 - DNA, 1443 bp, Triticum aestivum; identical to SEQ ID NO: 2345

SEQ ID NO: 2349 - DNA, 1443 bp, Triticum aestivum; identical to SEQ ID NO: 2345

SEQ ID NO: 2350 - DNA, 1443 bp, Triticum aestivum; identical to SEQ ID NO: 2345

SEQ ID NO: 2351 - DNA, 1446 bp, Triticum aestivum
atgagccgccgctttgtccccgtcggcagacgcatcttagagcagaacatcaaggctcggtaccacgccggagacattggcaccgaggacgcactccacctgtttgacgaattgctccaggttgctgggcgctcctcgatccatgccatcaactgcctcctcaccgttgtctgccgtgattgccctgcgctcggcgtctccctcttcaaccgcgtcgcaaggtccaaggtggcgcccagcagtatcacctatgccattctggtcgactgctgctgccgcgctggccgcctggaccttggacacactgccatgggacacatcatcaagacgggatttgcagcagaagccatcgtcaatttcaaccacctactcaaggccatctgtgcagagaacaagaccagctatgcaatggacatcgtactccgaataatgcccatgtttaactgtgtacccaacattttctcctacagcattcttttcaagggtctctgcaacgagaagaggagtcaagaggctctcgagctgattaacatgatggttgaggatggaggtagctgccgacctgatgtggtgacctataacaccgtgattgatggcttgttgaaagagggtgaggtaggcaaggcttacagcctattttgtgaaatgctgcgtcagggggtatcgccggatgctgtgacctgtagttcaatcatctctggcatgtgcaagcttcatgcaatggacaaggctgaggaggttcttcaacagatgcttgatagaagaattctgccaaatgttgccacatataatagtctgatacatggatattatttattaggacagtgcgaagaggtggatcggattttcaaggaaatgtctagaaatggtgttcaaccaaatgttgtaacttacaatatacagatggattatctttgcaagagcggaagatgcgcagaagctaggaagatttttgattctatgatcagtttgggccaaaaaccgaatgtttatacctacagcgttctactgcatgggtatgctatggaaaaatcttttcatgatatgcattgtctcattgatttgatggtagaaaatggtattgcaccagatcatcatgtctacaacatactcatatctgcatatgctaaagaagaaatggttggtgtggtaatgcatatatttacgaaaatgcggcagcaaggattgaaccctgatgcagtgagctacggagcagtaatagacttactttgcagcatgggccgaatggatgatgctatgtcccaatacaatcaaatgataactgaaggattactccctggtatcatagttttcaccccccttattagtggtttctgttcttgtggcaaatgggagaaggttgatgaactattttctgagatgttggatcgcggcatttgtcccaacagtgttcttcaacacaattatggaccgcctttgcaaaaa

SEQ ID NO: 2352 - DNA, 1446 bp, Triticum aestivum; identical to SEQ ID NO: 2351

SEQ ID NO: 2353 - DNA, 1446 bp, Triticum aestivum; identical to SEQ ID NO: 2351

SEQ ID NO: 2354 - DNA, 1446 bp, Triticum aestivum; identical to SEQ ID NO: 2351

SEQ ID NO: 2355 - DNA, 1446 bp, Triticum aestivum; identical to SEQ ID NO: 2351

SEQ ID NO: 2356 - DNA, 1446 bp, Triticum aestivum; identical to SEQ ID NO: 2351

SEQ ID NO: 2357 - DNA, 1470 bp, Triticum aestivum
atgtcgcgcctccatccccgctacttctccagctccatctcctcactcgccgacgagctgctgagcgaactccaccatcatctgggctcagggacgctcagtccgcagctcgcacaccaactgttcgacgaaatgctgcgccaacccgtcccagtatcatcgcgtgcactcaatggcttatttgctgccctcgcgcgtacgccaccctccaccacctgcacagatagccctgccctcgccatcaatctcttcaaccgcatggcccgagcaggtcgcggcagggtgatagcacccagcagtcacacctacagcatactaattgaatgctgctgcctcgcgcgccgtccggaccttgggccttccttcttcgctcacctcctcaagacaggcgtcacggcagacgtcgtcatcttcagtggcttattcaagtgcctctgtgacatgaagcgggcagacgaggctcaggacatactgctccataggatacctgacgacctgcatgatgccatctcctactcagtaattctcaagagcttctgcaacaatggattgagccagcgtgcgcttgacctgctccggatgatggccaaaaaaggtgctgaccactccccgggtgtgtttgcatacagcatggtaatccatggcttctttaaagagggtgaagtaagcaaagcatgcgatctattccatgaaatgatacaacaggggcctgtgcctaatgtggtgacgtacaactctgttatcgatgcgctatgcaaagcaagagcaatggacaaggcagaggtggttcttcgatcaatggttcataatggtgtccaaccaaatgttgtgacatataatagcttgatccaaggatattcaactgtgggacagttgaaagaagtcgctaggttgttgaaagtgatgagaagccaaggtgttatgccaagtgttgttacctacaactcactcatgggctacctttgcaagcatggaagaatcaaagaagctgaggaaatatttttttccatgaccctgaatggccgaaaaccagatatagtctcatactctattatgctccgtgggtacgctatagaaggatcccttgttaaaatgattgatctctgtgagctgatggcaagagatggagttgtacctgaactccattgtttcaacatactgattagtgcatatgctaagtatggaatgatggatgtggctatgcttttctttgaagacatgttgaagcaggggctgaaccctggtgatttcatttatttaactgtgatatctgcattttgtaagatgggcaggatggatgatgctctggaaaaattcaatgagatgattgataggggggtaccacttgacacaaaaatttacatgtgcatgattgagggttatttgaatcgtggtgattctgtgaaagccgaggaatttattaccaaaatgaagagtagggatattcgtcataggccgcggaagggtaat

SEQ ID NO: 2358 - DNA, 1470 bp, Triticum aestivum; identical to SEQ ID NO: 2357

SEQ ID NO: 2359 - DNA, 1470 bp, Triticum aestivum; identical to SEQ ID NO: 2357

SEQ ID NO: 2360 - DNA, 1470 bp, Triticum aestivum; identical to SEQ ID NO: 2357

SEQ ID NO: 2361 - DNA, 1470 bp, Triticum aestivum; identical to SEQ ID NO: 2357

SEQ ID NO: 2362 - DNA, 1470 bp, Triticum aestivum; identical to SEQ ID NO: 2357

SEQ ID NO: 2363 - DNA, 888 bp, Triticum aestivum
atggccaaaaaaggtgctgaccactcccccaacgtggtgtcatacaacacggtaatcaatggcttctttaaggagggcgaagtaagcaaagcatgcaatctattccacgaaatgatacaacagggggttgtgcctaatgaggtgacatatagctccattatcaatgcactatgcaaagcaagagcaatggataaggcagaggtgatccttcgacatatggttcatagtggtgtccaaccacatgataggatatataatatcctgatccatggatttttaacttcgggtcagctgaaagaagcctttaggctgttgaaactgatgacaagccaaggtgttatgccaaaccttgttacctgcaactcagtcatgacctaccattgcaagaatggaagagtaaaagaagctgcggaaatattttattccatggctgtgaagggccgaaaacctaatgtcatctcatactctattatgcttcatgggtacgcgacagaaggatcccttgttgaaatgattgatctctgtgagctgatggcaagagatggagttgtacccgaccgctctgttttcaacatactgattaaggcatatgctaaacatggaatgatcgatgtggctatgcttttctttgatgaaatgttgaagcagggggtgaaccctaatgatatcacatatttaactctgatatctgcattttgcaagatgggcagaatggatgatgccatgatcaaattcaatgagatgattgatatgggaataccacatgatacaactgtttacatgtgcatgattgagggttatttgaatcatggtgattccgtgaaagccaaggaatttattactaaaatgaagagcagggatgtttgtcatagcccgcggaagggtaat

SEQ ID NO: 2364 - DNA, 888 bp, Triticum aestivum; identical to SEQ ID NO: 2363

SEQ ID NO: 2365 - DNA, 888 bp, Triticum aestivum; identical to SEQ ID NO: 2363

SEQ ID NO: 2366 - DNA, 888 bp, Triticum aestivum; identical to SEQ ID NO: 2363

SEQ ID NO: 2367 - DNA, 777 bp, Triticum aestivum
atgatacaacagggggttgtgcctaatgaggtgacatatagctccattatcaatgcactatgcaaagcaagagcaatggataaggcagaggtgatccttcgacatatggttcatagtggtgtccaaccacatgataggatatataatatcctgatccatggatttttaacttcgggtcagctgaaagaagcctttaggctgttgaaactgatgacaagccaaggtgttatgccaaaccttgttacctgcaactcagtcatgacctaccattgcaagaatggaagagtaaaagaagctgcggaaatattttattccatggctgtgaagggccgaaaacctaatgtcatctcatgctctattatgcttcatgggtacgcgacagaaggatcccttgttgaaatgattgatctctgtgagctgatggcaagagatggagttgtacccgaccgctctgttttcaacatactgattaaggcatatgctaaacatggaatgatcgatgtggctatgcttttctttgatgaaatgttgaagcagggggtgaaccctaatgatatcacatatttaactctgatatctgcattttgcaagatgggcagaatggatgatgccatgatcaaattcaatgagatgattgatatgggaataccacatgatacaactgtttacatgtgcatgattgagggttatttgaatcatggtgattccgtgaaagccaaggaatttattactaaaatgaagagcagggatgtttgtcatagcccgcggaagggtaat

SEQ ID NO: 2368 - DNA, 633 bp, Triticum aestivum
atgtcgcgcctccacccccgctacttctccagctccatcccctcactcgccgacgagctgctgagcgaactccaccatcatctgggctctgggacgctcagtccgcagctcgcacaccaactgttcgacgaaatgctgcgccaacccgtcccagtatcatcgcgtgcgctcaatggcttatttgctgccctcgcgcgtacgccgccctccaccacctgcacagatagccctgccctcgccatcaatctcttcaaccgcatggcccgagcaggtcgcggcagggtgatagcacccagcagtcacacctacagcatactaattgaatgctgctgcctcgcgcgccgtccggaccttgggccttccttcttcgctcacctcctcaagacaggcgtcacggtagacgtcgtcaccttcagtggcttattcaagtgcctctgtgacatgaagcgcacggaggaggctctggatgtgctgcttcataaggtgcctcacaacctgcctaatgtcatctcctactcagtagttgtgaagagcttctgcgacaatggtaggagccagcttgcgcttgacctgctccgtataatggccaaaaaaggtgctgaccaccccccaacgtggtgtcatacaacacgg

SEQ ID NO: 2369 - DNA, 1470 bp, Triticum aestivum
atgtcgcgcctccacccccgctacttctccagctccatcccctcactcgccgacgagctgctgagcgaactccaccatcatctgggctctgggacgctcagtccgcagctcgcacaccaactgttcgacgaaatgctgcgccaacccgtcccagtatcatcgcgtgcgctcaatggcttatttgctgccctcgcgcgtacgccgccctccaccacctgcacagatagccctgccctcgccatcaatctcttcaaccgcatggcccgagcaggtcgcggcagggtgatagcacccagcagtcacacctacagcatactaattgaatgctgctgcctcgcgcgccgtccggaccttgggccttccttcttcgctcacctcctcaagacaggcgtcacggtagacgtcgtcaccttcagtggcttattcaagtgcctctgtgacatgaagcgcacggaggaggctctggatgtgctgcttcataaggtgccccacaacctgcctaatgtcatctcctactcagtagttgtgaagagcttctgcgacaatggtaggagccagcttgcgcttgacctgctccgtataatggccaaaaaaggtgctgaccactcccccaacgtggtgtcatacaacacggtaatcaatggcttctttaaggagggcgaagtaagcaaagcatgcaatctattccacgaaatgatacaacagggggttgtgcctaatgaggtgacatatagctccattatcaatgcactatgcaaagcaagagcaatggataaggcagaggtgatccttcgacatatggttcatagtggtgtccaaccacatgataggatatataatatcctgatccatggatttttaacttcgggtcagctgaaagaagcctttaggctgttgaaactgatgacaagccaaggtgttatgccaaacgttgttacctgcaactcagtcatgacataccattgcaagaatggaagagtaaaagaagctgcggaaatattttattccatggctgtgaagggccgaaaacctaatgtcatctcatactctattatgcttcatgggtacgcgacagaaggatcccttgttgaaatgattgatctctgtgagctgatggcaagagatggagttgtacccgaccgctctgttttcaacatactgattaaggcatatgctgaacatggaatgatcgatgtggctatgcttttctttgatgaaatgttgaagcagggggtgaaccctaatgatatcacatatttaactctgatatctgcattttgcaagatgggcagaatggatgatgccatgatcaaattcaatgagatgattgatatgggaataccacatgatacaactgtttacatgtgcatgattgagggttatttgaatcatggtgattccgtgaaagccaaggaatttattactaaaatgaagagcagggatgtttgtcatagcccgcggaagggtaat

SEQ ID NO: 2370 - DNA, 888 bp, Triticum aestivum; identical to SEQ ID NO: 2363

SEQ ID NO: 2371 - DNA, 1479 bp, Triticum aestivum
atgtcacgcctccagccccgctatttctccagctccgtgtcctcacgcgccaacgaactgctgagcgaattccaccatcatctgggctccggaacgctctggccggagctcgcgcgccaactgttcgaccaaatgctgcgccaacctgtcccggtatcagtacgtgcactcaacggcttatttgctgccctcgcgcgtgcgccgccctcaaccgcctgcaccaatgcccctgccctcgtcattgatctcttcaaccgcatggcccaagcaggtcgtcgccaggtgacagcacccaccatttacacctacagcatacttattgagtgctgccaccgagcatgccgcccagacctagggcttgccttcttcggccgcctcctccagacaggcatcacgacggacgtcattacctacagcagcttactcaagtgcctctgtgacatgaagcgcacggaggaggctttgggcgtgctgctccacaggatgcccaacgacctgcctaatgtcatctcctactcagtaattctcaagagcttctgcgacagtggtaggagccagcttgcgcttgatctgctccgaatgatggccgaaaaaggatctgaccactcccccagcgtggtgtcatacagcgtggtaatcgatggtttcttcaaggagggtgaaataagcaaagcatgtgatctgttccatgaaatgatgcagcagggggttgtgcccgatgtggtgatgtatacctccattatcaatgcgctatgcaaagcaagagcaatggacaaggcagaggtggttcttcgatcaatggttcataatggtgtccaaccagatgctgtgacatatactagcctgatccaaggatattcaactttaggccagttgaaagaagtcgctaggttgttgaaagtgatgagaagccaaggtgttatgccagacgttgttacctgcaccttagtcatggactacctttgcaagcatggaagaaccaaagaagctcaggaaatattttattccatggctgtgaatgggcaaaaacctgatattgtcgcatactgtactatgctctatgggtactctatagaaggatcccttgttgatatgatcgatctctgtgagctgatggcaagagatggagttgtacccaacctccgttgtttcaacatactgattaatgcatatgctaagcatggaatgatggatgtggccctgcttttcttcgaagatatgttgaagcagggggtgaagcctaatgaattcacttatttaactgtgatatctgcattttgcaagatgggcaggatggatgatgcgatggaaaaattccgtgagatgattgatatgggagtaccagttgacacagaagtttacatgtgcatgattgagggttatttgaatcacggtgactccgtgaaagcgaaggaattgattactgaaatgaagaacacggatattcgtcataagccgtggaagggtaatggaagaaca

SEQ ID NO: 2372 - DNA, 1479 bp, Triticum aestivum; identical to SEQ ID NO: 2371

SEQ ID NO: 2373 - DNA, 1479 bp, Triticum aestivum; identical to SEQ ID NO: 2371

SEQ ID NO: 2374 - DNA, 1479 bp, Triticum aestivum; identical to SEQ ID NO: 2371

SEQ ID NO: 2375 - DNA, 1479 bp, Triticum aestivum; identical to SEQ ID NO: 2371

SEQ ID NO: 2376 - DNA, 1479 bp, Triticum aestivum; identical to SEQ ID NO: 2371

SEQ ID NO: 2377 - DNA, 1134 bp, Triticum aestivum
atgccgcccagatcttggcctgccttcttcggccgcctcctcaagacaggcatcacgaaggacgtcgttacctacagcagcttattcaagtgcctctgcgacatgaagcgcacagaggaggctctgaacgtgctgctccataagatgcccgacgacctgcctaatgtcatctcctactcagtgattctcaagagcttctgcgacagtggtaggagccagctcgcgcttgacctgctccggatgatggccgaaaaaggatctggccactcccccagcgtggtgtcatacagcatggtaatcgatggtttcttcaaggagggtgaaataagcaaagcatgcgatctattccatgaaatgatacaacatggggttgtgcctactgtggtgacatataactccattattgatgcgcggtgcaaagcaagagcaatggacaaggcagaggtggttcttcgatcaatggttcataatggtgtccaaccagatgctgtgacatataattgcttgatccaaggatattcaactttgggccagttgaaagaagtcgctaggttgttgaaagtgatgagaagccaaggtgttctaccagatgttgttacctacaactcactcatgacctgcctttgcaagaatggaagattaaaggaagctgtagtttttttttattccatggccatgaacggccaaaaacctgatgtcatctcatactctgttttgctccatgggtacgctaaagaaggatccctcattgatatgattgatctctgtgagcggatggcaagagatggagttgtacccaacctccattgtttcaacatactgattagtgcatatgctaagtatggaaggatggatgtggctatgcttttcttcgaagacatgttgaagaaggggttgaaccctaatgaattcatttatttaactgtcatatctgcattttgcaagatgggcaggatggatgatgctctggaaaaattcaatgagatgattgatagaggagtaccacttgacataaaaatttacatgtgcatgattgagggttatttgaatcatggtgattctgtgaaagccgaggaatttattaccaaaatgaagagcagggatattcatcataggccgcggaagggtaattgt

SEQ ID NO: 2378 - DNA, 1134 bp, Triticum aestivum; identical to SEQ ID NO: 2377

SEQ ID NO: 2379 - DNA, 1134 bp, Triticum aestivum
atgccgcccagatcttggcctgccttcttcggccgcctcctcaagacaggcatcacgaaggacgtcgttacctacagcagcttattcaagtgcctctgcgacatgaagcgcacagaggaggctctgaacgtgctgctccataagatgcccgacgacctgcctaatgtcatctcctactcagtgattctcaagagcttctgcgacagtggtaggagccagctcgtgcttgacctgctccggatgatggccgaaaaaggatctggccactcccccagcgtggtgtcatacagcatggtaatcgatggtttcttcaaggagggtgaaataagcaaagcatgcgatctattccatgaaatgatacaacatggggttgtgcctactgtggtgacatataactccattattgatgcgcggtgcaaagcaagagcaatggacaaggcagaggtggttcttcgatcaatggttcataatggtgtccaaccagatgctgtgacatataattgcttgatccaaggatattcaactttgggccagttgaaagaagtcgctaggttgttgaaagtgatgagaagccaaggtgttctaccagatgttgttacctacaactcactcatgacctgcctttgcaagaatggaagattaaaggaagctgtagtttttttttattccatggccgtgaacggccaaaaacctgatgtcatctcatactctgttttgctccatgggtacgctaaagaaggatccctcattgatatgattgatctctgtgagcggatggcaagagatggagttgtacccaacctccattgtttcaacatactgattagtgcatatgctaagtatggaaggatggatgtggctatgcttttcttcgaagacatgttgaagaaggggttgaaccctaatgaattcatttatttaactgtcatatctgcattttgcaagatgggcaggatggatgatgctctggaaaaattcaatgagatgattgatagaggagtaccacttggcataaaaatttacatatgcatgattgagggttatttgaatcatggtgattctgtgaaagccgaggaatttattaccaaaatgaagagcaggggtattcgtcataggccgcggaagggtaattgt

SEQ ID NO: 2380 - DNA, 1473 bp, Triticum aestivum
atgtcacgcctccaggtccgctctctctccagctccttctcctcacgcgcctacgagctgctgaacgaactcgacggccgtctgggctccgggacgctcagcccagagcccgcgcgcgaactgttcgacgaaatgctgcgccaaccagtcccagtatcagtacgtgcactcaacggcttatttgctgccctttcgcgtgcgccgccctccaccatctacaccaatgcccctgccctcgccattgatctcttcaaccgcatggcccaagcaggccgtcgccaggtgacagcacctgacatttacacctacaacatactaattgactgctgccaccgagcatgccgcccggatcttgggcctgccttcttcggccgcctcctcaagacaggcatcacgaaggacgtcgttacctacagcagcttattcaagtgcctctgcgacatgaagcgcacagaggaggctctgaacgtgctgctccataagatgcctgacgacctgcctgatgccatctcctactcagtgattctcaagagcttctgcgacagtggtaggagccagctcgcgcttgacctgctccggatgatgaccgaaaaaggatctggccactcccccagcgtggtgtcatacagcatggtaattgatggtttcttcaaggagggtgaaataagcaaagcatgcgatctattccatgacatgatacaacatggggttgtgcctactgtggtgacatataactccattattgatgcgcggtgcaaagcaagagcaatggacaaggcagaggtggttcttcgatcaatggttcataatggtgtccaaccagatgctgtgacatataattgcttgatccaaggatattcaactttgggccagttgaaagaagtcgctaggttgttgaaagtgatgagaagccaaggtgttctaccagatgttgttacctacaactcactcatgacctgcctttgcaagaatggaagattcaaggaagctgtagaaattttttattccatggccgtgaacggccaaaaacctgatgtcatctcatactctgttttgctccatgggtacgctaaagaaggatccctcgttgatatgattgatctctgtgagcggatggcaagagatggagttgtacccaacctccattgtttcaacatactgattagtgcatatgctaagtatggaaggatggatgtggctatgcttttcttcgaagacatgttgaagaaggggttgaaccctaatgaattcatttatttaactgtcatatctgcattttgcaagatgggcaggatggatgatgctctggaaaaattcaatgagatgattgatagaggagtaccacttgacataaaaatttacatgtgcatgattgagggttatttgaatcatggtgattctgtgaaagccgaggaatttattaccaaaatgaagagcagggatattcgtcataggccgcggaagggtaattgt

SEQ ID NO: 2381 - DNA, 1134 bp, Triticum aestivum; identical to SEQ ID NO: 2377

SEQ ID NO: 2382 - DNA, 1134 bp, Triticum aestivum; identical to SEQ ID NO: 2377

SEQ ID NO: 2383 - DNA, 1134 bp, Triticum aestivum; identical to SEQ ID NO: 2379

SEQ ID NO: 2384 - DNA, 1470 bp, Triticum aestivum
atgtcacgccttcaggtccgctcttactctagccccgtttcctcacgcgccaacgatctgctgaccgaactccacggccatatgggcttcgggacgctcaggccagagctcgcgcaccaactgttcgacgaaatgttgggccaacctgtcccagtatcggtgcgtgcactcaacggcttatttgctgcactcgcgcgtgcgccgccctcaaccgcctgcactgatggccctgccctcgccgttgatctcttcaaccatatggcccgagcaggccgccgctggatgacagcacccaccattcacacctacaacatactaattgactgctgccaccgagcatgccgcccagacctagggcccgccttcttcggctgcctcctcaagacaggagtcacaacgagccccattacctacagcagcctattcaagtgcctctgtgacatgaagcgcacagaggaggctctggacatactgctccataggatagccgacgacctgcctaatgtcatctcctactcagtgattctcaagagtttctgcgacaatgggaggagccagcttgcgcttgacctgctccgggtgatggccaaaaaaggtggtgaccgctctcccgacgtgatgttatacaacatggtaatcgatggcttctttaaggagggtgaagtaagcaaagcatgcgatctattccatgaaatgatacaacagggggtagtgcctactgaggtgacatatagctccattatcaatgcgctatgcaaagcaagagcaatggacaaagcagaggtggtccttcgacatatggttcataatggtgtccaaccagatgttgtgacatatactagcctgatcaaaggatattcaactttaggccagttaaaagaagtcgctaggttgttgaaagtaatgagaagccaaggtgttatgccaggcattgttacctataccttagtcatggactacctttgcaagcatggaagaatcaaagaagctgaggaaatattttattccatggccgtgaatggccaaaaacgagatacggtctcatactctattatgctccatgggtacgctatagaaggatcccttgttcaaatgattgatctctgtgagctgatggcaagagatggagttgtacctgacctccgttgtttcaacatactgattaatgcatatgctaagtatggcatgatggatgcggccatgcttttctttgaagacatgttgaagcagggtgtgaagcctaatgaattcacttatttaactgtgatatctgcattttgcaagatgggcaggatggatgatgcgatggaaaaattcaatgagatgattgatatgggagtaccacttgacacagaagtttacatgtgcatggttgagggttattttaatcttgatgattccataaaagccaaggaatttattaccaaattgaagaacagggatattcatcataggccgcggaaaggtaat

SEQ ID NO: 2385 - DNA, 1470 bp, Triticum aestivum; identical to SEQ ID NO: 2384

SEQ ID NO: 2386 - DNA, 1470 bp, Triticum aestivum; identical to SEQ ID NO: 2384

SEQ ID NO: 2387 - DNA, 1470 bp, Triticum aestivum; identical to SEQ ID NO: 2384

SEQ ID NO: 2388 - DNA, 1470 bp, Triticum aestivum; identical to SEQ ID NO: 2384

SEQ ID NO: 2389 - DNA, 1470 bp, Triticum aestivum
atgtcacgccttcaggtccgctcttactctagccccgtttcctcacgcgccaacgatctgctgaccgaactccacggccatatgggcttcgggacgctcaggccagagctcgcgcaccaactgttcgacgaaatgttgggccaacctgtcccagtatcggtgcgtgcactcaacggcttatttgctgcactcgcgcgtgcgccgccctcaaccgcctgcactgatggccctgccctcgccgttgatctcttcaaccatatggcccgagcaggccgccgctggatgacagcacccaccattcacacctacaacatactaattgactgctgccaccgagcatgccgcccagacctagggcccgccttcttcggctgcctcctcaagacaggagtcacaacgagccccattacctacagcagcctattcaagtgcctctgtgacatgaagcgcacagaggaggctctggacatactgctccataggatagccgacgacctgcctaatgtcatctcctactcagtgattctcaagagtttctgcgacagtgggaggagccagcttgcgcttgacctgctccgggtgatggccaaaaaaggtggtgaccgctctcccaacgtgatgtcatacaacatggtaatcgatggcttctttaaggagggtgaagtaagcaaagcatgcgatctattccatgaaatgatacaacagggggtagtgcctactgaggtgacatatagctccattatcaatgcgctatgcaaagcaagagcaatggacaaagcagaggtggtccttcgacatatggttcataatggtgtccaaccagatgttgtgacatatactagcctgatcaaaggatattcaactttaggccagttaaaagaagtcgctaggttgttgaaagtaatgagaagccaaggtgttatgccagacattgttacctataccttagtcatggactacctttgcaagcatggaagaatcaaagaagctgaggaaatattttattccatggccgtgaatggccaaaaacgagatacggtctcatactctattatgttccatgggtacgctatagaaggatcccttgttcaaatgattgatctctgtgagctgatggcaagagatggagttgtacctgacctccgttgtttcaacatactgattaatgcatatgctaagtatggcatgatggatgcggccatgcttttctttgaagacatgttgaagcagggtgtgaagcctaatgaattcacttatttaactgtgatatctgcattttgcaagatgggcaggatggatgatgcgatggaaaaattcaatgagatgattgatatgggagtaccacttgacacagaagtttacatgtgcatggttgagggttattttaatcttgatgattccataaaagccaaggaatttattaccaaattgaagaacagggatattcatcataggccgcggaaaggtaat

SEQ ID NO: 2390 - DNA, 702 bp, Triticum aestivum
atggacaaggcagaggtggttcttcgatcaatggttcataatggtgcccaaccagatgctgtgacatataatagcttgatccaaggatattcaactttgggacagttgaaagaagtcgctaggttgttgaaagtgatgagaagccaaggtgttatgccaagcgttgttacctgcaactcactcatgacctgcctttgcaagaatggaagattcaaggaagctgtagaatttttttattccatggccgtgaacggccaaaaacctgatgtcatctcatactctgttttgctccatgggtacgctaaagaaggatccctcattgatatgattgatctctgtgagcggatggcaagagatggagttgtacccgacctccattgtttcaacatactgattagtgcatatgctaagtatggaaggatggatgtggctatgcttttcttcgaagacatgttgaagaaggggttgaaccctaatgaattcatttatttaactgtcatatctgcattttgcaagatggacaggatggatgatgctctggaaaaattcaatgagatgattgataggggagtaccacttgacacaaaaatttacatgtgcatgattgagggttatttgaaccatggtgattctgtgaaagccgaggaatttattaccaaaatgaagagcagggatattcgtcataggccgtggaagggtaat

SEQ ID NO: 2391 - DNA, 1212 bp, Triticum aestivum
atggcccgagcaggccgtcgccaggcgacagcacccaccatttacacctacagcatactaatggagtgttgccaccgagcatgccgcccagacctagggcttgccttcttcggccgcctcctcaagacaggcatcccgacaaacatcattgactacagcagcttgttcaagtgcctctgtgacatgaagcgcacagaggaggctctgaacgtgctgctccataagatgcccgacgacctgcctaatgtcatctcatactcagtgattctcaagagcttctgcgacaatgggaggagccagcttgcgcttgatctgctccagatgatggccaaaaaaggcgctgaccactcccccgacgtgatgtcatacaacatggtaattgatggcttctttaaggagggtgaagtaagcaaagcatgcgatctattccaagaaatgatacgacaggggattgtgccaactgaggtgacatatagctccattatcaatgcgctatgcaaagcaagagcaatggacaaggcagaggtggttcttcgatcaatggttcataatggtgcccaaccagatgctgtgacatataatagcttgatccaaggatattcaactttgggacagttgaaagaagtcgctaggttgttgaaagtgatgagaagccaaggtgttatgccaagcgttgttacctgcaactcactcatgacctgcctttgcaagaatggaagattcaaggaagctgtagaatttttttattccatggccgtgaacggccaaaaacctgatgtcatctcatactctgttttgctccatgggtacgctaaagaaggatccctcattgatatgattgatctctgtgagcggatggcaagagatggagttgcacccgacctccattgtttcaacatactgattagtgcatatgctaagtatggaaggatggatgtggctatgcttttcttcgaagacatgttgaagaaggggttgaaccctaatgaattcatttatttaactgtcatatctgtattttgcaagatgggcaggatggatgatgctctggaaaaattcaatgagatgattgataggggagtaccacttgacacaaaaatttacatgtgcatgattgagggttatttgaaccatggtgattctgtgaaagccgaggaatttattaccaaaatgaagagcagggatattcgtcataggctgtggaagggtaat

SEQ ID NO: 2392 - DNA, 801 bp, Triticum aestivum
atgtcacgctttcaggtccgctctttctctagctccgtttcctcacgcgcccacgaactgctggacgaactccacgaccatctgggcttcagaacgctcaggccagagctcgcgcaccaactgttcgacgaaatgctgcgccaacctgtcccagtatcagctcgtgcactcagcggcttatttgctgcacttgcgcgtgcgccgccctcacctgcgtgcaccgatagccctgccctcgccattgatctgttcaaccgcatggcccgagcaggccgtcgccaggcgacagcacccaccatttacacctacagcatactaatggagtgttgccaccgagcatgccgcccagacctagggcttgccttcttcggccgcctgctcaagacaggcatcaagatggatggcattacctacagcagcttgttcaagtgcctctgtgacatgaagcgcacagaggaggctctgaacgtgctgttccataagatgcccgacgacctgcctaatgtcatctcatactcagtgattctcaagagcttatgcgacaatgggaggagccagcttgcgcttgatctgctccagatgatggccaaaaaaggcgctgaccactcccccgacgtgatgtcatacaacatggtaattgatggcttctttaaggagggtgaagtaagcaaagcatgcgatctattccaagaaatgatacgacaggggattgtgcctactgaggtgacatatagctccattatcaatgcgctatgcaaagcaagaggacaaggcagaggtggttcttcgatcaatggttca

SEQ ID NO: 2393 - DNA, 720 bp, Triticum aestivum
atgcgctatgcaaagcaagaggacaaggcagaggtggttcttcgatcaatggttcataatggtgcccaactagatgctgtgacatataatagcttgatgcaaggatattcaactttgggacagttgaaagaagtcgctaggttgttgaaagtgatgagaagccaaggtgttatgccaagcgttgttacctacaactcactcatgacctgcctttgcaagaatggaagattcaaggaagctgtagaatttttttattccatggccgtgaacggccaaaaacctgatgtcatctcatactctgttttgctccatgggtacgctaaagaaggatccctcattgatatgattgatctctgtgagcggatggcaagagatggagttgtacccgacctccattgtttcaacatactgattagtgcatatgctaagtatggaaggatgggtgtggctatgcttttcttcgaagacatgttgaagaaggggttgaaccctaatgaattcatttatttaactgtcatatctgcattttgcaagatgggcaggatggatgatgctctggaaaaattcaatgagatgattgataggggagtaccacttgacacaaaaaattacatgtgcatgattgagggttatttgaaccatggtgattctgtgaaagctgaggaatttattaccaaaatgaagagcagggatattcgtcataggccgtggaagggtaat

SEQ ID NO: 2394 - DNA, 801 bp, Triticum aestivum
atgtcacgctttcaggtccgctctttctctagctccgtttcctcacgcgcccacgaactgctggacgaactccacgaccatctgggcttcagaacgctcaggccagagctcgcgcaccaactgttcgacgaaatgctgcgccaacctgtcccagtatcagctcgtgcactcagcggcttatttgctgcacttgcgcgtgcgccgccctcacctgcgtgcaccgatagccctgccctcgccattgatctgttcaaccgcatggcccgagcaggccgtcgccaggcgacagcacccaccatttacacctacagcatactaatggagtgttgccaccgagcatgccgcccagacctagggcttgccttcttcggccgcctgctcaagacaggcatcaagatggatgtcattacctacagcagcttgttcaagtgcctctgtgacatgaagcgcacagaggaggctctgaacgtgctgttccataagatgcccgacgacctgcctaatgtcatctcatactcagtgattctcaagagcttatgcgacaatgggaggagccagcttgcgcttgatctgctccagatgatggccaaaaaaggcgctgaccactcccccgacgtgatgtcatacaacatggtaattgatggcttctttaaggagggtgaagtaagcaaagcatgggatctattccaagaaatgatacgacaggggattgtgcctactgaggtgacatatagctccattatcaatgcgctatgcaaagcaagaggacaaggcagaggtggttcttcgatcaatggttca

SEQ ID NO: 2395 - DNA, 1212 bp, Triticum aestivum
atggcccgagcaggccgtcgccaggcgacagcacccaccatttacacctacagcatactaatggagtgttgccaccgagcatgccgcccagacctagggcttgccttcttcggccgcctcctcaagacaggcatcccgacaaacatcattgactacagcagcttgttcaagtgcctctgtgacatgaagcgcacagaggaggctctgaacgtgctgctccataagatgcccgacgacctgcctaatgtcatctcatactcagtgattctcaagagcttctgcgacaatgggaggagccagcttgcgcttgatctgctccagatgatggccaaaaaaggcgctgaccactcccccgacgtgatgtcatacaacatggtaattgatggcttctttaaggagggtgaagtaagcaaagcatgcgatctattccaagaaatgatacgacaggggattgtgcctactgaggtgacatatagctccattatcaatgcgctatgcaaagcaagagcaatggacaaggcagaggtggttcttcgatcaatggttcataatggtgcccaaccagatgctgtgacatataatagcttgatccaaggatattcaactttgggacagttgaaagaagtcgctaggttgttgaaagtgatgagaagccaaggtgttatgccaagcgttgttacctgcaactcactcatgacctgcctttgcaagaatggaagattcaaggaagctgtagaatttttttattccatggccgtgaacggccaaaaacctgatgtcatctcatactctgttttgctccatgggtacgctaaagaaggatccctcattgatatgattgatctctgtgagcggatggcaagagatggagttgtacccgacctccattgtttcaacatactgattagtgcatatgctaagtatggaaggatggatgtggctatgcttttcttcgaagacatgttgaagaaggggttgaaccctaatgaattcatttatttaactgtcatatctgcattttgcaagatgggcaggatggatgatgctctggaaaaattcaatgagatgattgataggggagtaccacttgacacaaaaatttacatgtgcatgattgagggttatttgaaccatggtgattctgtgaaagccgaggaatttattaccaaaatgaagagcagggatattcgtcataggccgtggaagggtaat

SEQ ID NO: 2396 - DNA, 1470 bp, Triticum aestivum
atgtcacaatttcaggtccgctctttctctagctccgtttcctcacgcgcccacgagctgctggacgaactccacgaccacctgggcttcagaacgctcaggccagagctcgcgcaccaactgttcgacgaaatgctgtgccaacctgtcccagtatcagctcgtgcactcagcggcttatttgctgcacttgcgcgtgcgccgccctcacctgcgtgcaccgatagccctgccctcgccattgatctcttcaaccgcatggcccgagcaggccgtcgccaggcgacagcacccaccatttacacctacagcatactaatggagtgttgccaccgagcatgccgcccagacctagggcttgccttcttcggccgcctgctcaagacaggcatcaagacggatgtcattacctacagcagcttgttcaagtgcctctgtgacatgaagcgcacagaggaggctctgaacgtgctgttccataagatgcccgacgacctgcctaatgtcatctcatactcagtgattctcaagagcttctgcgacaatgggaggagccagcttgcgcttgatctgctccagatgatggccaaaaaaggcgctgaccactcccccgacgtgatgtcatacaacatggtaattgatggcttctttaaggagggtgaagtaagcaaagcatgcgatctattccaagaaatgatacgacaggggattgtgcctactgaggtgacatatagctccattatcaatgcgctatgcaaagcaagagcaatggacaaggcagaggtggttcttcgatcaatggttcataatggtgcccaaccagatgctgtgacatataatagcttgatccaaggatattcaactttgggacagttgaaagaagtcgctaggttgttgaaagtgatgagaagccaaggtgttatgccaagcgttgttacctgcaactcactcatgacctgcctttgcaagaatggaagattcaaggaagctgtagaatttttttattccatggccgtgaacggccaaaaacctgatgtcatctcatactctgttttgctccatgggtacgctaaagaaggatccctcattgatatgattgatctctgtgagcggatggcaagagatggagttgtacccgacctccattgtttcaacgtactgattagtgcatatgctaagtatggaaggatggatgtggctatgcttttcttcgaagacatgttgaagaaggggttgaaccctaatgaattcatttatttaactgtcatatctgcattttgcaagatgggcaggatggatgatgctctggaaaaattcaatgagatgattgataggggagtaccacttgacacaaaaatttacatgtgcatgattgagggttatttgaaccatggtgattctgtgaaagccgaggaatttattaccaaaatgaagagcagggatattcgtcataggccgtggaagggtaat

SEQ ID NO: 2397 - DNA, 801 bp, Triticum aestivum; identical to SEQ ID NO: 2392

SEQ ID NO: 2398 - DNA, 801 bp, Triticum aestivum; identical to SEQ ID NO: 2392

SEQ ID NO: 2399 - DNA, 720 bp, Triticum aestivum; identical to SEQ ID NO: 2393

SEQ ID NO: 2400 - DNA, 801 bp, Triticum aestivum; identical to SEQ ID NO: 2392

SEQ ID NO: 2401 - DNA, 801 bp, Triticum aestivum; identical to SEQ ID NO: 2394

SEQ ID NO: 2402 - DNA, 780 bp, Triticum aestivum
atgtcacgccttcaggtccgctctttctccagccccgtttcctcacgcgccaacgatctgctgaccgaactccacgcccatctgggcttcgggacgctcaggccagagctcgcgcaccaactgttcgacgaaatgctgcgccaacctgtcccagtatcagctcgtgcactcagcggcttatttgctgcactcgcgcgtgcgccgccctcaaccgcctgcactgatggccctgccctcgccatcgatctcttcaaccatatggccagagcaggccgccgctggatgacagcacccaccattcacacctacaacatactaattgactgctgccaccgagcatgccgcccagacctagggcctgccttcttcagccgcctcctcaagacaggcatcacaatgagcgtcattacctacagcagcttattcaagtgcctctgtgacatgaagcgcacggaggaggctttgggcgtgctgctccacaggatgcccgacgagctgcctgatgtcatctcctactcagtaattctcaagagcttctgcgacagtggtaggagccagcttgcgcttgatctgctccgaatgatggccgaaaaaggatctgaccactcccccagcgtggtgtcatacagcgtggtaatcgatggtttcttcaaggagggtgaaataagcaaagcatgtgatctgttccatgaaatgatgcagcagggggttgtgcccgatgtggtgatgtacacctccattatcaatgcgctatgcaaagcaagagcaatggacaaggca

SEQ ID NO: 2403 - DNA, 1470 bp, Triticum aestivum
atgtcacgccttcaggtccgctctttctccagccccatttcctcacgcgccaacgatctgctgaccgaactccacggccatctgggcttcgggacgctcaggccagagctcgcgcaccaactgttcgacgaaatgctgcgccaacctgtcccagtatcagcgcgtgcactcaacggcttatttgctgcactcgcgcgtgcgccgccctcaaccgcctgcactgatggccctgccctcgccgtcgatctcttcaaccatatggccagagcaggccgccgctggatgacagcacccaccattcacacctacaacatactaattgactgctgccaccgagcatgccgcccagacctagggcctgccttcttcagccgcctcctcaagataggcatcacaatgagcgtcattacctacagcagcttattcaagtgcctctgtgacatgaagcgcacggaggaggctttgggcgtgctgctccacaggatgcccgacgacctgcctgatgtcatctcctactcagtaattctcaagagcttctgcgacagtggtaggagccagcttgcgcttgatctgctccgaatgatggccgaaaaaggatctgatcactcccccagcgtagtgtcatacagtgtggtaatcgatggtttcttcaaggagggtgaaataagcaaagcatgtgatctgttccatgaaatgatgcagcagggggttgtgcccgatgtggtgatgtatacctccattatcaatgcgctatgcaaagcaagagcaatggacaaggcagaggtggttcttcgatcaatggttcataatggtgtccaaccagatgctgtgacatataatagcttgatccaaggatattcaactctgggacagttgaaagaactcgctaggttgttgaaagtgatgagaagccaaggtgttatgccaagcgttgttacctacaactcactcatgacctgcctttgcaagaatggaagattcaaggaagctgtagaaattttttatttgatggctatgaagggccaaaaacctgatctcatctcatactctattttgctccatgggtatgctaaagaaggatccctcattgatatgattgatctctgtgagcagatggcaagagatggagttgtacccgacctccattgtttcaacatactgattagtgcatatgctaagtatggaaggatggatgtggctatgcttttcttcgaagacatgttgaagaaggggttgaaccctaatgaaatcatttatttaactgtcatatctgcattttgcaagatgggcaggatggatgatgccctggaaaaattcaatgagatgattgataggggagtactacttgacacaaaaatttacatgtgcatgattgagggttatttgaaccatggtgattctgtgaaagccgaggaatttattaccaaaatgaagagcagggatattcgtcataggccgcggaagggtaac

SEQ ID NO: 2404 - DNA, 1452 bp, Triticum aestivum
atgtcgcgcctccagccccgctctttctccagccccgtctcctcacgagtcagcgagctgctggatgaattcaaatgtcatctgggttctgggacgctctggccggagctcgcgcaccaactgttcgacgaaatgctgcgccaacccgtcccggtttcagcacgcgcactcggcggcttattttctgccctcgcgcgtgcgcggccctcaaccgcctgtactgatggccccgccctcgccatcgatctcttcaaccgccaccggatagcacctgacatttacacctacaacatactaattgactgctgccaccgagcatgccgcccagacctagggcctgccttcttcggatgccttctcaagacaggcatcacgacggacgtcattacctacagcagtttattgcagtgcttctgtgacatgaagcggacagaggaagctctggacctgctgctccatattgtgagtgataacctgcctgatgccatctcctactcagtaattctcaagagcttctgcgacaacggaaggagccagtgtgcgcttgacctgctccagatgatggccaaaaaaggtgctgaccattcccccaacgtggtctcatacaacttggtaatcaatggtttctttaaggagggtgaaataagcaaagcatgtgatctgttccatgaaatgatacaacaagggtttgttcctgatgtggtgacatataactctgttattaatgcactgtgcaaagcaagagcaatggacaaggcagaggtggtccttcgatcgatggttcataatagtgtccaaccggatgttgtaacatataatagcttgatccaaggatttttaactacgggtcagctgaaagaagcctttaggttgttgaaagtgatgagaagccaaggtgttatgccaagcgttgttacttgcacctcggtcatggactacctttgcaagcatggaagaatcaaagaagctgaggaaacattttattccatggccgcgagtggccgaaaaccagatacagtctcatactctattatgctccttgggtacgctatagaaggatcccttgttaaaatgattgatctctgtgagatgatggcaagagatggagttgtacccgacctccgttgtttcaacatactgattaaggcatatgctaagtatggcaggatggatgtggccatgcttttctttgaagacatgttgaagcagggtgtgaagcctaatgaattcacttatttaactgtgatatctgcattttgcaagatgggcaggatggatgatgcgatggaaaaattcaatgagatgattgatatgggagtatcacttgacacagaagtttacatgtgcatggttgagggttattttaatcatggtgattccatgaaagccgaggaatttattaccaaaatgaagaacagggatattcatcataagccatggaaaggtaatcga

SEQ ID NO: 2405 - DNA, 1452 bp, Triticum aestivum
atgtcgcgcctccagccccgctctttctccagtcccgtctcctcacgagtcagcgagctgctggatgaattcaaatatcatctgggctctgggacgctctggccggagctcgcgcaccaactattcgacgaaatgctgcgccaacccgtcccggtttcagcacgcgcactcggcggcttattttctgccctcgcgcgtgcgcggccctcaaccgcctgtactgatggccccgccctcgccatcgatctcttcaaccgccaccggatagcacctgacatttacacctacaacatactaattaactgctgccaccgagcatgccgcccagacctagggcctgccttcttcggatgccttctcaagacaggcatcacgacggacgtcattacctacagcagtttattgcagtgcttctgtgacatgaagcggacagaggaagctctggacctgctgctccatagggtgagtgataacctgcctgatgccatctcctactcagttattctcaagagcttctgcgacaacggaaggagccagtgtgcgcttgacctgctccagatgatggccaaaaaaggtgctgaccattcccccaacgtggtctcatacaacttggtaatcaatggtttctttaaggagggtgaaataagcaaagcatgtgatctgttccatgaaatgatacaacaagggtttgttcccgatgtggtgacgtataactctgttattaatgcactgtgcaaagcaagagcaatggacaaggcagaggtggtccttcgatcgatggttcataatagtgtccaaccggatgttgtaacatataatagcttgatccaaggatttttaactacgggtcagctgaaagaagcctttaggttgttgaaagtgatgagaagccaaggtgttatgccaagcgttgttacttgcacctcagtcatggactacctttgcaagcatggaagaatcaaagaagctgaggaaacattttattccatggccgtgagtggccgaaaaccagatacagtctcatactctattatgctccttgggtacgctatagaaggatcccttgttaaaatgattgatctctgtgagatgatggcaagagatggagttgtacccgacctccgttgtttcaacatactgattaaggcatatgctaagtatggcaggatggatgtggccatgcttttctttgaagacatgttgaagcagggtgtgaagcctaatggattcacttatttaattgtgatatctgcattttgcaagatgggcaggatggatgatgcgatggaaaaattcaatgagatgattgatatgggagtaccacttgacacagaagtttacatgtgcatggttgagggttattttaatcatggtgattccatgaaagccgaggaatttattaccaaaatgaagaacagggatattcatcataagccatggaaaggtaatcga

SEQ ID NO: 2406 - DNA, 1452 bp, Triticum aestivum
atgtcgcgcctccagccccgctctttctccagccccgtctcctcacgagtcagcgagctgctggatgaattcaaatatcatctgggctctgggacgctctggccggagctcgcgcaccaactgttcgacgaaatgctgcgccaacccgtcccggtttcagcacgcgcactcggcggcttattttctgccctcgcgcgtgcgcggccctcaaccgcctgtactgatggccccgccctcgccatcgatctcttcaaccgccaccggatagcacctgacatttacacctacaacatactaattaactgctgccaccgagcatgccgcccagacctagggcctgccttcttcggatgccttctcaagacaggcatcacgacggacgtcattacctacagcagtttattgcagtgcttctgtgacatgaagcggacagaggaagctctggacctgctgctccatagggtgagtgataacctgcctgatgccatctcctactcagttattctcaagagcttctgcgacaacggaaggagccagtgtgcgcttgacctgctccagatgatggccaaaaaaggtgctgaccattcccccaacgtggtctcatacaacttggtaatcaatggtttctttaaggagggtgaaataagcaaagcatgtgatctgttccatgaaatgatacaacaagggtttgttcccgatgtggtgacgtataactctgttattaatgcactgtgcaaagcaagagcaatggacaaggcagaggtggtccttcgatcgatggttcataatagtgtccaaccggatgttgtaacatataatagcttgatccaaggatttttaactacgggtcagctgaaagaagcctttaggttgttgaaagtgatgagaagccaaggtgttatgccaagcgttgttacttgcacctcagtcatggactacctttgcaagcatggaagaatcaaagaagctgaggaaacattttattccatggccgtgagtggccgaaaaccagatacagtctcatactctattatgctccttgggtacgctatagaaggatcccttgttaaaatgattgatctctgtgagatgatggcaagagatggagttgtacccgacctccgttgtttcaacatactgattaaggcatatgctaagtatggcaggatggatgtggccatgcttttctttgaagacatgttgaagcagggtgtgaagcctaatggattcacttatttaattgtgatatctgcattttgcaagatgggcaggatggatgatgcgatggaaaaattcaatgagatgattgatatgggagtaccacttgacacagaagtttacatgtgcatggttgagggttattttaatcatggtgattccatgaaagccgaggaatttattactaaaatgaagaacagggatattcatcataagccatggaaaggtaatcga

SEQ ID NO: 2407 - DNA, 1452 bp, Triticum aestivum
atgtcgcgcctccagccccgctctttctccagccccgtctcctcacgagtcagcgagctgctggatgaattcaaatatcatctgggctctgggacgctctggccggagctcgcgcaccaactgttcgacgaaatgctgcgccaacccgtcccggtttcagcacgcgcactcggcggcttattttctgccctcgcgcgtgcgcggccctcaaccgcctgtactgatggccccgccctcgccatcgatctcttcaaccgccaccggatagcacctgacatttacacctacaacatactaattaactgctgccaccgagcatgccgcccagacctagggcctgccttcttcggatgccttctcaagacaggcatcacgacggacgtcattacctacagcagtttattgcagtgcttctgtgacatgaagcggacagaggaagctctggacctgctgctccatagggtgagtgataacctgcctgatgccatctcctactcagttattctcaagagcttctgcgacaacggaaggagccagtgtgcgcttgacctgctccagatgatggccaaaaaaggtgctgaccattcccccaacgtggtctcatacaacttggtaatcaatggtttctttaaggagggtgaaataagcaaagcatgtgatctgttccatgaaatgatacaacaagggtttgttcccgatgtggtgacgtataactctgttattaatgcaccgtgcaaagcaagagcaatggacaaggcagaggtggtccttcgatcgatggttcataatagtgtccaaccggatgttgtaacatataatagcttgatccaaggatttttaactacgggtcagctgaaagaagcctttaggttgttgaaagtgatgagaagccaaggtgttatgccaagcgttgttacttgcacctcagtcatggactacctttgcaagcatggaagaatcaaagaagctgaggaaacattttattccatggccgtgagtggccgaaaaccagatacagtctcatactctattatgctccttgggtacgctatagaaggatcccttgttaaaatgattgatctctgtgagatgatggcaagagatggagttgtacccgacctccgttgtttcaacatactgattaaggcatatgctaagtatggcaggatggatgtggccatgcttttctttgaagacatgttgaagcagggtgtgaagcctaatggattcacttatttaattgtgatatctgcattttgcaagatgggcaggatggatgatgcgatggaaaaattcaatgagatgattgatatgggagtaccacttgacacagaagtttacatgtgcatggttgagggttattttaatcatggtgattccatgaaagccgaggaatttattactaaaatgaagaacagggatattcatcataagccatggaaaggtaatcga

SEQ ID NO: 2408 - DNA, 1452 bp, Triticum aestivum; identical to SEQ ID NO: 2406

SEQ ID NO: 2409 - DNA, 1452 bp, Triticum aestivum; identical to SEQ ID NO: 2405

SEQ ID NO: 2410 - DNA, 1452 bp, Triticum aestivum; identical to SEQ ID NO: 2406

SEQ ID NO: 2411 - DNA, 894 bp, Triticum aestivum
atgagccgccgctttccccctggagctatgagcagacgcatcttggagcggaaaattcaagaccggtaccgtgccggacacattggcactgacgacgcactcaacctgttcgacgaattgatccaggttgctgggccttcctcggtccgcgccatcaactgcctcctcaccgttgtcggccgtgattgccccgcgctcggcgtctccctcttcaaccgtgttgcaagagccaaggtgcctccacacaatatcacctatggcattctagtcgactgctgctgccgtgctggccgcttggaccttggacacgctgccatgggacacgtcatcaagttgggatttacagcagaagctattgtcaatttcagccacctactcaaggccatctgtgcagagaagaagaccagttatgcaatggacattgtactccggataatgcccgagtttaactgtgttccgaacattttctcctataacattcttttcaagggtctctgcaatgagaggagaagccaagaggctgttgagctgattaacattatggttgaggatggacgaggttgctgccgacctgatgtggtgacctataacactgtaatcgatggcttgttgaaagagggtgaggtaggcaaggcttacagcctattttgtgaaatgccacagaggggaatttcgccggatgatgtgacctggaactcaatcatctctggcatgtgcaaggttcatgcgatggacaaggctgaggatgttcttgaacagatgcttgatagaggaattctgccagatgttaccacatataatagtctgatacatggatattattcactaggacagtgcgaagaggtggaccggatttcaaggaaatgtctagaaatggtgttcaaccagatattg

SEQ ID NO: 2412 - DNA, 1425 bp, Triticum aestivum
atggccgtctgtgcggagaagaagaccagctatggaatggacatcgtgctccgaattatgcctgagcttaactgcataccggatgtttactcctacagcattcttttcaagggtctctgcaacgagaagagaagccaagaggctctcgagctgattcacatgatggttgagcatggaggtagctgccaacctaatctggtctcatacaacaccgtaattgacggcttgttgaaagagggtgaggtgggcaaggcttacagcctattttgtgaaatggtacagagagggatttcgccaaatattgtgacctacaactcaatcatctctggcatgtgcaaggttcatgcaacggacaaggctgagaaggttcttcaacagatgtttgatagagaatttctgcctgatactgccacatatactagcctaatacatggatattattcatcaggacaatgcaaagaggtggaacaggttttcgagcacatgtctataaatggtgttcaaccaaatatgataacttacaatatacagatggattatcattgcaagagcggaagatgcacggaagctaggaagatctttgattctatggtcagtttgggccaaaaaccgtctgtttctacctacagtattctgcttcatggttatgctattgaaaaatcatttcatgatatgcattgtctccttgatttgatggtagaaaatggtatctcaccagatcatcatgtctacaacatactcatatctgcatatgctaaagaggaaatggcaagtgaggtaatgcatatatttacaaaaatgcggcagcaaggattgaaccctagtgttgcgaactatggagcggtaataaacttgctttccagtattggcagaatggatgatgctatgtcccaattcaatcaaatgatagccgaaggattagctcctgatatcatagttttcaacccccttattagtggtttttgtacttgtggcaaatgggagaaggttcatgaactattttctgaaatgttgaatcgcggcatctatcctgataccgtgttcttcaccacaattatggaccgcctttgcaaaaatggaagggttatggaagcccaagatatgtttgacctgatggtacacatgggtgttaagcctaatgttcatgcttatgccacattgatgcatgggtactttttcgttaggaagatggatgaagtgaggaagttacttggcaatatgctctcaattggcttgaaaccggatgttttcatctataccatattgattgatggttactctaagaatggaatgatagataacgcatcagctgttttcactgagatgttggaaaagaatattaagccttctgccatcacttatagcacaatgctctatggcctatttcatgctggactgttgctgccattgaactatatctcagga

SEQ ID NO: 2413 - DNA, 1071 bp, Triticum aestivum
atggactgcagctgccgcgcacaccgcctcgatctggcgtttgccttcttcggccgtctcctcaggacgggactgaaggcaggcgtcatagaagtcaacagtctcctcaaaggactctgccacgcaaagcgggcggatgaggccatggaagtgcttcttcacaggatgcctgagctgtttataggagtacagggcacagctgtttatcgttccctaatccagggattttgtacacacggcgatttggtgaaagcaaaggaatatgttactgaaatgatgaagaaaggtatgcctcctcctgatattatgttcttcagttcaatcatgcagaacctatgcacagaaggaagggtaatagaagcacgagatatccttgacttgatagtgcgcattggtatgaggcctgatgttttcatatttaatatactgatcggtggatactgcctagtcggcaagatggaggatgcctcaaaaatatttgatgatatggtgtcatatggtttagaaccttgtaactttacgtatggtatacttattaatggctattgcaaaaataaaaggattgatgacgggcttattctgttcaaagagatgctgcgcaagggacttaaacctacaacttttaattataacgtcatactggatggattatttctggctggacaaactgttgctgcaaaagagaagtttgatgagatggttgaatctggagtaagtgtgtgcattgatacatactctatagttcttggtggactttgtagaaatagctgcagtagcgaagcgatcaccctgttccgaaaattaagcgcaatgaatgtgaaatttaatattacaattgtcaataccattattggtgccttctacagggtcgagagaaaccaagaggctaaggatttgtttgctgctattccagccagtggcttggttcctaatgttcttacctacaccataatgattaaaaatcttataaaagaaggttcagtggaagaagctaacaatctttttttatcgatggagaagagcggctgtagtgccaactcttatctgttaaatcatatcatcagaaggtgt

SEQ ID NO: 2414 - DNA, 1338 bp, Triticum aestivum
atgctgcgccaacctgtcccaatatcagcgcgtgcactcaacggcttatttgttgcactcgcgcgtgcgccgccctcaaccgcctgcaccaatgcctctgccctcgccatcgatctcttcaaccgcatggcccaagcaggtcgtcgccaggtgacagcgcccaccatttacacctacaatatactaattgactgctgccatcgagcatgctgcccggacctagggcctgccttcttcggccgccgcctcaagacaggcataccgacggacatcattacctacagcaacttattcaagtgcctctgcgacatgaagcgcacggaggaggctttgggcgtgctgctccacaggatgcccgatgacctgcctgatgtcatctcctactcagtaattctcaagagtttatgtgacaatggtaggtgccagctcgcgcttgacctgctccggatgattgccgaaaaaggatctgaccactcccccagcgtggtgtcatacagcatggtaatcgatggtttcttcaaggagggtgaaataagcaaagcatgtgatctgttccatgaaatgatgcagcagggggttgtgcccgatgtggtgacgtatagctctgttatcgatgctctgtgcaaagcaagagcaatggacaaggcagaggtggttcttcgatcaatggttcataatggtgtccaaccagatgctgtgacatataattgcctgatccaaggatattcgactttgggacagttgaaagaagtcgctaggttgttgaaagtgatgagaagccaaggtgttatgccaagcgttgttacctacacctcactcatggactacctttgcaagcatggaagaatcaaagaagctgaggaaatattttattccatggctgtgaatggacgaaaaccagatatagtctcatactctattatgctccgtgggtacgctatagaaggatccctcattgatatgatccatctctgtgagctgatggcaagaaatggagttgtacccgacctctattgtttcaacatactgattaatgcatgtgctaagcatggaatgatggatgtggccctgcttttcttcgaagatatgttgaagcagggggtgaagcctaatgaattcacttatttaactgtgatatctgcattttgcaagatgggcaggatggatgatgcgatggaaaaattccgtgagatgattgatatgggagtaccagttgacacagaagtttacatgtgcatggttgagggttattttaaaaatggtgattcagtgaaagccaaggattttattaccaaaatgaagaacaaggatatttcaaataggccgcagaagggtaat

SEQ ID NO: 2415 - DNA, 1338 bp, Triticum aestivum; identical to SEQ ID NO: 2414

SEQ ID NO: 2416 - DNA, 1338 bp, Triticum aestivum; identical to SEQ ID NO: 2414

SEQ ID NO: 2417 - DNA, 1338 bp, Triticum aestivum; identical to SEQ ID NO: 2414

SEQ ID NO: 2418 - DNA, 1338 bp, Triticum aestivum; identical to SEQ ID NO: 2414

SEQ ID NO: 2419 - DNA, 1338 bp, Triticum aestivum; identical to SEQ ID NO: 2414

SEQ ID NO: 2420 - DNA, 1431 bp, Triticum aestivum
atgtcacgcctccagccccgctcctcacgcgccaacgagctgctagacgaattcaaatatcatctgggctccgggacgctctggccggagctcgcgcaccaactgttcgacgaattgctgcgccaacccgtcccggtttcagcgcgcgcactcaacggcttgtttgctgccctcgcggatgcgccgccctcggccaactgcgcagatggccctgccctagccatcaatctcttcaaccgccaccggatatcacctaacatttacacctacaacatactaattgagtgctgccacagagcatgccgcccagacctagggcctgccttcttcggccgcctcctcaaggcaggcatcacaatgagcgtcattacctacaacagcttattcaagtgcctctgtgacatgaagcgcacggaggaggcttccgacgtgctgctccacaggatgcctgacgacctgcctgatgtcatctcctactcagtaattctcaagagtttctgcgacagtgggaggagccagcgtgcgcttgacctgctccgggtgatggccaaaaaaggtggtgactactctcccaacgtgatttcatacaacatggtaatggatggcttttttaaggagggtgaagtaagcaaagcacgtgttctattccacgaaatgatacaacagggggttgtgcctactgaggtgacatatagctccataatcaatgcgctatgcaaagcaagagcaatggataaggcggaggtgatccttcgacatatggttcgtagtggtgtccaaccacatgataggatatataataccctgatccatggatttttaacttcaggtcagctgaaagaagcctttaggctgttgaaactgatgacaagccaaggtgttatgccaagcgttgttacctacaactcactcatgacctacctttgcaagaatggaagattcaaggaagctgtagaacttttttattcaatggctgtgaagggccaaaaacctagtgtcgtctcatactctataatactccatgggtacgctatagaaggatcccttgttaaaatgattgatctctgtgagctgatggcaagagacggagttgtacctaacctccattgtttcaacatactgattaatgcgtatgctaagtatggcatgatggacgtggccatgcttttcttcgaagacatgttgaagcagggtgtgaagcctaatgaattcacttatttaactgtgatatctgcgttttgcaagatgggcaggatggatgatgcgatggaaaaattcagtgagatgattaatatgggagtaccacttgacacagaagtttacatgtgcatggttgagggttatttgaatcttggcaattccatgaaagccaaggaatttattaccaaaatgaagaacagggatattcatcataggccacggaaaggtaat

SEQ ID NO: 2421 - DNA, 1431 bp, Triticum aestivum; identical to SEQ ID NO: 2420

SEQ ID NO: 2422 - DNA, 1431 bp, Triticum aestivum; identical to SEQ ID NO: 2420

SEQ ID NO: 2423 - DNA, 1431 bp, Triticum aestivum; identical to SEQ ID NO: 2420

SEQ ID NO: 2424 - DNA, 1431 bp, Triticum aestivum; identical to SEQ ID NO: 2420

SEQ ID NO: 2425 - DNA, 1431 bp, Triticum aestivum; identical to SEQ ID NO: 2420

SEQ ID NO: 2426 - DNA, 1212 bp, Triticum aestivum
atggccagagcaggccgccactggatgacagcacccaccattcacacctacaacatactaattgactgctgccaccgagcatgccgcccagacctagggcctgccttcttcagccgcctcctcaagacaggcatcacaatgagcgtcattacctacagcagcttattcaagtgcctctgtgacatgaagcgcacggaggaggctttgggcgtgctgctccacaggatgcccgacgacctgcctgatgtcatctcctactcagtaattctcaagagcttctgcgacagtggtaggagccagcttgcgcttgatctgctccgaatgatggccgaaaaaggatctgaccactcccccagcgtggtgtcatacagtgtggtaatcgatggtttcttcaaggagggtgaaataagcaaagcatgtgatctgttccatgaaatgatgcagcagggggttgtgcccgatgtggtgatgtatacctccattatcaatgcgctatgcaaggcaagagcaatggacaaggcagaggtggttcttcgatcaatggttcataatggtgcccaaccagatgctgtgacatataatagcctgatccaaggatattcaactttgggccagttgaaagatgtcgttaggttgttgaaagtaatgagaagccaaggtgttatgccaagcgttgttacctacacctcactcatggactgcctttgcaagcatggaagaatcaaagaagctgaggaaatattttattccatggctgtgaatggacaaaaaccagatatagtctcatactctattatgctccgtgggtatgctatagaaggatccctcgttgatatgatcgatctctgtgagctgatggcaagaaatggagttgtacccgacctccagtttttcaacatagtgattaatgcatatgctaagcatggaatgatggatgtggccctgcttttcttcgaagatatgttgaagcagggggtgaagcctaatgaattcacttatttaactgtgatatctgcattttgcaagatgggcaggatggatgatgcggtggaaaaattccgtgagatgattgatatgggagtaccagttgacacagaagtttacatgtgcatggttgagggttattttaaaaatggtgattcagtgaaagccaaggattttattaccaaaatgaagaacaaggatattccaaataggccgcagaagggtaat

SEQ ID NO: 2427 - DNA, 1368 bp, Triticum aestivum
atgtgcaaggttcaagcaatggatgaggccgaggaggtccttcaacagatgtttgatacaggtattctgccaaatattactacatataatagtctgatacacggatattattcatcaggacagtgcgaacaggtggctcatattttcaagaaaatgtctaggaatggtgttcagccagatattgcaacttacaccatacagatggattatctttgcaagagtagaagatttgcgggagctagaactatttttgattctatggccggtaaggaccaaaaaccgaatgttactagctacagtattctgcttcatgcatatgctatggaacagtcagtccatgatatgcattgtctcattgaattgatggtagaaaatggtattgcaccaaatcattctgtgtacaacatactgatagttgcatatgctaaggggaaaatgtttgatgaggtaatgcatatatttacaaaaatgcggcagcaaggattgaacccaaatgctgcgagctatggaacagtaataaacttactttgcagtattggccgaatggatgatgctatgttgcaattcaatcaaatgataactgaagaattagctcctgatatcatagttttcaacactcttataagtggtttttgttcttgtggaaaatgggagaaggttcatgaactacttgctgaaatgttgaatcgtggcatctatcccgacaacgtgttcttcaacacaattatggatcacctttgcaaaaatggaagggttatggaatcccaagatctcgctgacctgatgatacacatgggtttgaagcctgacatgcatacttataacacactgatgggtggatactttttcattggtaagatggatgaagtgaggaagttacttgaccatatggtctcaattggcatggaaccagatgttgtcacctataacacactgattgatggttactttaagaatggaatgatagatgatgcgttagctattttcagtgaaatgctggacaaaaaagttaagccttgtgttatcacttataacacagtgttgcatgggttatttcatactggaaggactgttgctgcaaatgaactctatctcaggatgattgacagcggaatatgtgtggatattgtgacctacaacataattctcagtggtttgtgtagaaataactgtgtggatgaagcactaagaatgtttcaaaacctgtgttcaacaaattatcaacttgagatcaggacttataatattatgattagtgcgttgcttaaagttggcaggaaggaagaagccacaggtttgttggatggaatctcggccaaaggatttgtgctcgatgctgttacgtatagattaatgatacaaagcttt

SEQ ID NO: 2428 - DNA, 825 bp, Triticum aestivum
atggatgatgctatgttgcaattcaatcaaatgataactgaagaattagctcctgatatcatagttttcaacactcttataagtggtttttgttcttgtggaaaatgggagaaggttcatgaactacttgctgaaatgttgaatcgtggcatctatcccgacaacgtgttcttcaacacaattatggatcacctttgcaaaaatggaagggttatggaatcccaagatctcgctgacctgatgatacacatgggtttgaagcctgacgtgcatacttataacacactgatgggtggatactttttcattggtaagatggatgaagtgaggaagttacttgaccatatggtctcaattggcatggaactggatgttgtcacctataacacactgattgatggttactttaagaatggaatgatagatgatgcgttagctgttttcagtgaaatgttggacaagaaagttaagccttgcgctatcacttataacacagtgctgcatgggttatttcatactggaaggactgttgctgcaaatgaactctatctcaggatgattgacagcggaatatgtgtggatattgtgacctacaacattattctcagtggtctgtgtagaaataactgtgtggatgaagcactaagaatgtttcaaaacctgtgttcaacaaattatcaacttgagaccaggacttataatattatgattagtgcgttgcttaaagttggcaggaaggaagaagccacaggtttgttggatggaatctcggccaaaggatttgtgcccgatgctgttacgtatagattaatgatacaaagcttt

SEQ ID NO: 2429 - DNA, 825 bp, Triticum aestivum; identical to SEQ ID NO: 2428

SEQ ID NO: 2430 - DNA, 915 bp, Triticum aestivum
atgtttgatacaggtattctgccaaatattactacatataatagtctgatacacggatattattcatcaggacagtgcgaagaggtggctcatattttcaagaaaatgtctaggaatggtgttcagccagatattgcaacttacaccatacagatggattatctttccaagagtagaagatttgcggaagctagaactatttttgattctatggccggtaaggaccaaaaaccgaatgttactagctacagtattctgcttcatgcgtatgctatggaacagtcagtccatgatatgcattgtctcattgaattgatggtagaaaatggtattgcaccaaatcattctgtgtacaacatattgatagttgcatatgctaaggggaaaatgtttgatgaggtaatgcatatatttacaaaaatgcggcagcaaggattgaacccaaatgctgcgagctatggaacagtaataaacttactttgcagtattggccgaatggatgatgctatgttgcaattcaatcaaatgataactgaagaattagctcctgatatcatagttttcaacactcttataagtggtttttgttcttgtggaaaatgggagaaggttcatgaactacttgctgaaatgttgaatcgtggcatctatcccgacaacgtgttcttcaacacaattatggatcacctttgcaaaaatggaagggttatggaatcccaagatctcgctgacctgatgatacacatgggtttgaagcctgacatgcatacttataacacactgatgggtggatactttttcattggtaagatggatgaagtgaggaagttacttgaccatatggtctcaattggcatggaaccagatgttgtcacctataacacactgattgatggttactttaagaatggaatg

SEQ ID NO: 2431 - DNA, 825 bp, Triticum aestivum; identical to SEQ ID NO: 2428

SEQ ID NO: 2432 - DNA, 1368 bp, Triticum aestivum; identical to SEQ ID NO: 2427

SEQ ID NO: 2433 - DNA, 825 bp, Triticum aestivum; identical to SEQ ID NO: 2428

SEQ ID NO: 2434 - DNA, 690 bp, Triticum aestivum
atgttgaatcgtggcatctatcccgacaacgtgttcttcaacacaattatggatcacctttgcaaaaatggaagggttatggaatcccaagatctcgctgacctgatgatacacatgggtttgaagcctgacatgcatacttataacacactgatgggtggatactttttcattggtaagatggatgaagtgaggaagttacttgaccatatggtctcaattggcatggaaccagatgttgtcacctataacacactgattgatggttactttaagaatggaatgatagatgatgcgttagctattttcagtgaaatgctggacaaaaaagttaagccttgtgttatcacttataacacagtgttgcatgggttatttcatactggaaggactgttgctgcaaatgaactctatctcaggatgattgacagcggaatatgtgtggatattgtgacctacaacataattctcagtggtttgtgtagaaataactgtgtggatgaagcactaagaatgtttcaaaacctgtgttcaacaaattatcaacttgagatcaggacttataatattatgattagtgcgttgcttaaagttggcaggaaggaagaagccacaggtttgttggatggaatctcggccaaaggatttgtgctcgatgctgttacgtatagattaatgatacaaagcttt

SEQ ID NO: 2435 - DNA, 1368 bp, Triticum aestivum; identical to SEQ ID NO: 2427

SEQ ID NO: 2436 - DNA, 1368 bp, Triticum aestivum; identical to SEQ ID NO: 2427

SEQ ID NO: 2437 - DNA, 825 bp, Triticum aestivum; identical to SEQ ID NO: 2428

SEQ ID NO: 2438 - DNA, 1368 bp, Triticum aestivum; identical to SEQ ID NO: 2427

SEQ ID NO: 2439 - DNA, 612 bp, Triticum aestivum
atgtgcaaggttcaagcaatggataaggccgaggaggtccttcaacagatgtttgatacaggtattctgccaaatattactacatataatagtctgatacacggatattattcatcaggacagtgcgaagaggtggctcatattttcaagaaaatgtctaggaatggtgttcagccagatattgcaacttacaccatacagatggattatctttccaagagtagaagatttgcggaagctagaactatttttgattctatggccggtaaggaccaaaaaccgaatgttactagctacagtattctgcttcatgcgtatgctatggaacagtcagtccatgatatgcattgtctcattgaattgatggtagaaaatggtattgcaccaaatcattctgtgtacaacatattgatagttgcatatgctaaggggaaaatgtttgatgaggtaatgcatatatttacaaaaatgcggcagcaaggattgaacccaaatgctgcgagctatggaacagtaataaacttactttgcagtattggccgaatggatgatgctatgttgcaattcaatcaaatgataactgaagaattagctcctgattcagcctcattt

SEQ ID NO: 2440 - DNA, 825 bp, Triticum aestivum; identical to SEQ ID NO: 2428

SEQ ID NO: 2441 - DNA, 1077 bp, Triticum aestivum
atgccaaccgcccgcctgtcctccctctccacctcctccttcaaggctccttcacgagagcgccgagcccccctcgccgccttggctgccgccacggagcgcgtccgcgagggaacgctaagtcggcaggacgcgcaccacctgttcgacgaattgctaggccaagccgccgccgtcccggaacgcgggctgaacaactttcttgccgcactagcccgtgctccgccctcatctgcctgcagcgatggccccggccttgccattgccctcttcaaccgcatgtcccaaggcgctggtgcacgggtggtgtcgcccacgctctgtacctattccatcctcatggactgctgctgccgcgcaggccgcccggacttggtggttgccttcttcggtcgcctcatcaggttggggttgcgcttggaggtcatctccttcagcaatctcctcaaggggctttgcaaggccaagcgctcaaatgaggcattggatctgctgctccaccggatgcctgaactggactgtgcgcctgatgtcttctcctacagcattgtaatcaacggctgctttaaagaaggtgaagtagacaaagcgtgcaatctcttccatgagatgatccaactgggagttcaacctaatgtggccatctacacctcaattatcgatgcactaagcaagtgcggagccatggacaaggcagaagtggtccttcggcaaatggttgatcaaggcattggacccaacatcaggacatatactagcctgatacatggatattccgcttcgggtcagtggaaggaggcagttaggttattcaagaaaatgataaggcttggtgctctaccagataccgtcatgtggaactcatttatggattcactttgcaagcatagaaggacaaaggatgctagagatatttttgactccatggctgcaaagggccaaaaacctgatattttctcctattctactatgcttaacgggtatgcgaaagaaggatgcttcgatgatatgacttgtctcttcaattcgatgctacagaatggtattctacctgatcaccgtgttttcaacattgat

SEQ ID NO: 2442 - DNA, 1077 bp, Triticum aestivum; identical to SEQ ID NO: 2441

SEQ ID NO: 2443 - DNA, 1077 bp, Triticum aestivum; identical to SEQ ID NO: 2441

SEQ ID NO: 2444 - DNA, 1077 bp, Triticum aestivum; identical to SEQ ID NO: 2441

SEQ ID NO: 2445 - DNA, 1077 bp, Triticum aestivum; identical to SEQ ID NO: 2441

SEQ ID NO: 2446 - DNA, 1077 bp, Triticum aestivum; identical to SEQ ID NO: 2441

SEQ ID NO: 2447 - DNA, 1341 bp, Triticum aestivum
atgctgcgccaacctgtcacagtatcagtacgtgcactcaacggcttatttgctgctcttgcgcgtgcgccgccctccaccatctgcaccgatgcccttgccctcgccattgatctcttcaaccgcatggcccaagcaggccgtcgccaggtgccagcacccaccattatcacctacaacatactgattggctgctgccaccgagcatgccgcccggacctagggcctgccttcttcggccgcctgctcaaggcaggcatcaagacggatgtcattacctacagcagcttgttcaagtgcctctgtgacatgaagcgcacagaggaggctctgaacatgctgttccataagatgcccgaagacctgcctaatgtcatctcatactcagtgattctcaagagcttctgcgacaatgggaggagccagcttgcgcttgatctgctccagatgatggccaaaaaaggcgctgaccactcccccgacgtgatgtcatacaacatggtaattgatggcttctttaaggagggtgaagtaagcaaagcatgcgatctattccaagaaatgatacgacaggggattgtgcctactgaggtgacatatagctccattatcaatgcgctatgcaaagcaagagcaatggacaaggcagaggtggttcttcgatcaatggttcataatggtgcccaaccagatgctgtgacatataatagcttgatccaaggatattcaactttgggacagttgaaagaagtcgctaggttgttgaaagtgacgagaagccaaggtgttatgccaagcgttgttacctacaactcactcatggactacctttgcaagcatggaagaatcaaagaagctgaggaaatattttattccatggccgtgaatggccgaagaccagatatagtctcatactctattatgctccatgggtacgctatagaaggatcccttgttaaaatgattgatctctgtgagctgatggcaagagatggagttgtacccgacctccgttgtttcaacatactgattaatgcatatgctaagtatggtaggatggatgtggccatgcttttctttgaagacatgttgaagcagggtgtgaagcctaatgaattcacttatttaactgtgatatctgcattttgcaagatgggcaggatggatgatgcgatggaaaaattcagtgagatgattgatatcggagtaccacttgacacagaagtttacatgtgcatggttgagggttattttaatcatggtgattccatgaaagccgaggaatttattaccagaatgaagaacagggatattaatcataagccgtgggaaggtaatcga

SEQ ID NO: 2448 - DNA, 723 bp, Triticum aestivum
atggatcgcctttgcaaaaatggaagggttacggaagcccaggatctctttgacctgatggtacacatgggtgtgaagcctgacgtgtgtacttataacacactgatgggtggatacttgttcgttggtaagatggatgaagtgagcaagttacttgacaatatggtctcaattggcatggaaccagatgttatcacatatagcatactgattgatggttactctaagaatggaaggatagatgatgcattggttgttttcagggaaatgttggacacgaagggtaagccgtctgttatcagttttaatattatgattggtgcattgcttaaatgtggtaggaaggaagaagccaaagatttgtttgatggtatctgggccaatgggttagtgcctgacgttattacatatagcttaatgatacaaaaacttattgaagaaggttctctacaagagtctgatgatctattcctttctacggagaagaatggatgtgctgccgactcccgtaggctaaatgctatagttagaagcttacttcagaaaggggagattcctagggctgggacttatctgtctaaaattgatgagaggggcttcacccttgaagcttccacagctagcttgttgactgcacttgcttcagggggaaaaggccaggaatacaaggagttactccctgaaaaataccactcttttctggaacagggcactttgaacttc

SEQ ID NO: 2449 - DNA, 723 bp, Triticum aestivum; identical to SEQ ID NO: 2448

SEQ ID NO: 2450 - DNA, 1362 bp, Triticum aestivum
atggagcaagcccatccccctaactctgctctcgttatttcctatcccaggctgcgccgatccggtctggtaggtggtgagcggtggcgacgcattataacttacaatatacagatggattatctttgcaagagcggtcaatgtgcagaagctaggaagatttttgattctatgatcagtctgggccaaaacccgactgctactacctacagtattctgcttcatgggtatgctatggaaaaatcttttcatgatatgcattgtcttattgatttgatggtagaaaatggcatttcacctgatcattatgtctacaacatactcatatctgcatacgctaaagaagaaatggttggtgaggtaatgcatatatttacaaaaatgcggcagcaaggattgaaccctgatgcagtgagctacggaacagtaatagacttactttccaggattggccgaatggatgatgctatgtccctattcaatcaaatgataactgaaggattagctcctggtaccatagttttcaaccaccttattagtggtttttgtacttgtggcaaatgggagaaggttcatgaactattttctgaaatgttggatcgcggcatctgtccagacacagtgttcttcaacacagttatggatcgcctttgcaaaaatggaagggttacggaagcccaggatctctttgacctgatggtacacatgggtgtgaagcctgacgtgtgtacttataacacactgatgggtggatacttgttcgttggtaagatggatgaagtgagcaagttacttgacaatatggtctcaattggcatggaaccagatgttatcacatatagcatactgattgatggttactctaagaatggaaggatagatgatgcattggttgttttcagggaaatgttggacacgaagggtaagccgtctgttatcagttttaatattatgattggtgcattgcttaaatgtggtaggaaggaagaagccaaagatttgtttgatggtatctgggccaatgggttagtgcctgacgttattacatatagcttaatgatacaaaaacttattgaagaaggttctctacaagagtctgatgatctattcctttctacggagaagaatggatgtgctgccgactcccgtaggctaaatgctatagttagaagcttacttcagaaaggggagattcctagggctgggacttatctgtctaaaattgatgagaggggcttcacccttgaagcttccacagctagcttgttgactgcacttgcttcagggggaaaaggccaggaatacaaggagttactccctgaaaaataccactcttttctggaacagggcactttgaacttc

SEQ ID NO: 2451 - DNA, 723 bp, Triticum aestivum; identical to SEQ ID NO: 2448

SEQ ID NO: 2452 - DNA, 1371 bp, Triticum aestivum
atgtcaaacattggcatgccaatttttggcagcaaaccaattatgctccatgttccgcatgcgcctccgcaactcctccaccatgcccatgtcccgcatcggcctcctccgccgccgcctctcctcctcctcctcctcctacttctccacctccacctcgccaccctcacggtcacggtcatggtctccccgcgacgcctttgccgcggccacggagcgcgtccgcgccgggacgctcagcccggaggacgcacaccacctgttcgaccaattgctacggcaggacactccggtccacgagcgctccctgggcggcttccttgccgccctcgcccgtgcgccagactcagctgcctgcagagatggccccgccctcgccatcgccctcttcaaccgcgtatgccgaggagaagcaggccggcgggtggtgccgcccacagtctacacctacgccatcctgatgaactgctgctgccgcgtgcgtcgtccggacctagggcttgccttatttggccgcctcctaaggacaggcctcaaaacaaattagatcgtcgccagcaccgtcctcaagtgccttgctgcgcaaaacggacagatgaagcagtaaacgtgctgattcataggatgtccgacctcggctgtgtgccaaatgagttctcatacaacacagttctgaagagcctgtgtgaagatagcaggagccagcgagcgctcgatctgctccgggtgatggcaaaaggagatggctgctccccctgcgtggtgtcatacagcactgtcatctatggcttctttaaggaaggaaaagtaggcaaggcatgcaatctatttcatgaaatgacgcagcaaggcgttgtgtctgatgtggtgacatataactcaattatcgatgcactgtgcaaggccagagctatggacaaggctgagctattccttcggcagatggttgatgatgatattcgaccgaatggagtgacatatactgcaatgatccatggatattccactttgggccagtggaaaaaggcgactcaaatgtttagagaaatgacaagccgcggtcttgtaccagatactgtcacttggaactcattcatggcctccctctgcaagcatggaagaagcagagaagctgcagaacttctttattccatggctgcgaagggccacaagcctaatgtcgtatcctactctactttgcttcatgggtatgcaaacgaagggtgctttgctgatatggttaatctttttaattcaatggtaggcaaaggtattgtaccggaccaccatgttttcaacatattcattaatgcatatgctaaatgtgggatgatggatgaagttatgcatatgttgactgaaatgcaggaa

SEQ ID NO: 2453 - DNA, 1290 bp, Triticum aestivum
atgtctagaaatggtgttcaaccagatattgtaacttataatatacagatggattatctttgcaagaatggaggatgcgcagaagctaggaaattttttgattccatgatcagtttgggccaaaaaccgactgttactacctacaacattctgcttcatgggtatgctatggaaagatcttttcatgatatgaattgtctcattgatttgatggtaggaaatggtattgcaccagatcataatgtctacaacatactcatatctgcatatgctaaagaagaaacggttggtgaggtaatgcatatatttacaaaaatgcggcagcaaggattgaaccctaatgcagcgagctatggaacggtaataaacttactttgcagaattggcagaatggatgatgctgtgttgcaattcactcaaatgataacggaaggattaactcctgatatcatagttttcaccccccttattagtggtttttgtgcgtgtggcaaactggagaaggttcatgaactattttctgagatgttggatcgcggcatctatcctgataccatgttcttcaccacagttatggaccgcctttgcaaaaatggaagggttatggaagcccgagatatctttgatctgatggtacacatgggtgtaaagcctgacgtgcgtagttatgccacactgatgcatggatactttttagttggtaagatggacgaagtgaggaagttacttgacaatatgtgctcaattggcatggaaccagatgttgtcacctatagcatactgattgatggttactctaagaatggaaggatagatgatgcatttgttgttttcaaggaaatgttggaagggaaggttaagccttgtgttatcacttttactattatgattggtgcgttgcttaaatgtggcaggaaggaagaagccaaagatttgtttgatggtatctgggccaatggattagtgcccaatgttattacatatagcttaatgatacaaaaccttatagaagaaggttctctacaagagtctgatgatctcttcctttctatggagaagaatgggtgtgctgctgactcacgtatgctaaatgctatagttagaaggttacttcagagaggggagatgccaagggctgggacttatctgtctaaaattgacgaggggagcttcacccttgaagcttccacagctggcttattgactgcgcttgcttcaggggggaaatgtcaggaatataaggggttactgcctgaaaaatatcactcttttctggaacagggcactgat

SEQ ID NO: 2454 - DNA, 1290 bp, Triticum aestivum; identical to SEQ ID NO: 2453

SEQ ID NO: 2455 - DNA, 1290 bp, Triticum aestivum; identical to SEQ ID NO: 2453

SEQ ID NO: 2456 - DNA, 1326 bp, Triticum aestivum
atgagcggccactttgtccccgtcgacagacgcatcttggagcagaacatcaaggctcggtaccacgccggagacattggcaccgaggatgcactccacctgtttgacgaattgctccagtgtgctgggtcctcctcgatccgtgccatcaactatctcgttactactgtcggccgtgattcccctgcgctcggcgtctccctcttcaaccgcgtcgcaagtgccaatgtggcaccaaacagtatgacgtacaccatcctcgttgactgctgctgccgtgctggccgcttggacctcggtttcgctgccatgggccacatcatcaagatgggatttgcagcagatgctatcgtcactttcagccacctactcaaggccatctgtgcggagaagaagaccagctatgcaatggacatcgtactccgaataatgcccatgtttaactgcgtacccgacaatttctcctacaacattcttttcaagggtctttgcaacgaaaggagaagccaagaggctcttgagctgattcacatgatggtacagcatggaggtagctgccaacctaatgtggtgtcctataacaccgtagttgatggcctgttgaaagagggtgaggtgggcaaagcttacaccctattttctgaaatgctgcgtcaggggatatcaccggatgttgtgacctgtacttccatcatctctggcatgtgcaaggttcatgcaatggacaaggctgaggaggttcttcaacagatgcttgatagaagaattctgccagatgctgccacatataattgtctgatacatggatattatttattaggacagtgcgaagaggtggatcggattttcaaggaaatgtctagaaatggtgttcaaccaaatattgtaacttacaatatacagatggattatctttgcaagagcggaaggtgcgcagaagctaggaaaatatttgattctatgatcggtttgggccaaaaaccggttgttactacctacagtattctactgcatgggtatgctatggaaaaatcttttcatgatatgcattgtctcattgatttgatggtagaaaatggtattgcaccaaatcatcctgtctacaacatactcatatctgcatgtgctcaagaagaaatggttagtgaggtaatgcatatatttacaaaaatgcggcagcaaggattgaaccctaatgtagcgaactatggagtggttgtaaacttgctttccaggattggccgaatggatgatgctatgtccctattcaatcaaatgataactgaaggattagctcctgatatcatagttttcacccccccttat

SEQ ID NO: 2457 - DNA, 1326 bp, Triticum aestivum; identical to SEQ ID NO: 2456

SEQ ID NO: 2458 - DNA, 1326 bp, Triticum aestivum; identical to SEQ ID NO: 2456

SEQ ID NO: 2459 - DNA, 1326 bp, Triticum aestivum; identical to SEQ ID NO: 2456

SEQ ID NO: 2460 - DNA, 1326 bp, Triticum aestivum; identical to SEQ ID NO: 2456

SEQ ID NO: 2461 - DNA, 1326 bp, Triticum aestivum; identical to SEQ ID NO: 2456

SEQ ID NO: 2462 - DNA, 1305 bp, Triticum aestivum
atgtctcgcctccgcctcctccgccgcagctcctcctccaccacactgatacccctcctccggctcctccgccgctgctccacctccacctccacgtcgccgccctcacgctcctggtctccccgagacgcctttgttgcggccatagagcgtgttcgcgccaggacgctcagcccggaagacgctcaccacctgttcgacgatttgctcggtcaggccaccccggtccccgtgcgcaccctgaacggcttctttgccgtcctcgcccgtgccacgtcctctgccgcctgcatccgagatggccccgcccttgccgtcgctctcttcaaccgcgtgtgccaagaagaggccggtccgcgtgtggcgacgcccacagtccacacctatggcatcctcatggactgctgctgccgcgcacgtcgcccggacctagggctcgccttattcggccgcttcctcgggacaggcctgaggacaaacgagatcgtcgccaccaccttcctcaagtgcctctgctgcgcgaaacggacagaagaggttgtgaaagtactgcttcacagaatgcccgagctgggctgtgtgcctaatgccatctcgtactccatagttttgaaaagcttgtgtgaaaatagcatgagtcagcaggcactcgacctgctccagatggtagggaaagaaggaggctgccttcgtgatgtggtggcatataacacaatcatccatggcttctttaaggagtgcggaatagacaaggcatgccatctattccatgaaatgatgcggcaaggggttgtgccgactgtggtgacatacaacacagtaattgatgcgttgtgcaaggccggagaaatggacaaggcagagctagtctttcagcggatggctcgtaatggtgcgcagcccaataaagtgacatgtaatggcagtaaatttagttcactgactgacggatattgctcagtcggcaagatggataaaacattcaaactgcttgatgccatggtatcagatggaattgagcctgatgctgttacttatagtgcacttcttgatggctattttaaaaatggaaggatcgatgatggtttgactctatttagagaaatgtcgtgcaagggagttaaaccaacaactgtgacatatggcatcatactggatggtttatatcgtgctgggagaactgctgctgccaagaaaatgtttgatcagatgatcaaaagtggaataacagtgaccgtttccatatacactactccctcctttccggtttataaggcatatttcaacttttttgtttttccaatt

SEQ ID NO: 2463 - DNA, 1305 bp, Triticum aestivum
atgtctcgcctccgcctcctccgccgcagctcctcctccaccacactgatacccctcctccggctcctccgccgctgctccacctccacctccacgtcgccgccctcacgctcctggtctccccgagacgcctttgttgcggccatagagcgtgttcgcgccaggacgctcagcccggaagacgctcaccacctgttcgacgatttgctcggtcaggccaccccggtccccgtgcgcaccctgaacggcttctttgccgtcctcgcccgtgccacgtcctctgccgcctgcatccgagatggccccgcccttgccgtcgctctcttcaaccgcgtgtgccaagaagaggccggtccgcgtgtggcgacgcccacagtccacacctatggcatcctcatggactgctgctgccgcgcgcgtcgcccggacctagggctcgccttattcggccgcttcctcgggacaggcctgaggacaaacgagatcgtcgccaccaccttcctcaagtgcctctgctgcgcgaaacggacagaagaggttgtgaaagtactgcttcacagaatgcccgagctgggctgtgtgcctaatgccatctcgtactccatagttttgaaaagcttgtgtgaaaatagcatgagtcagcaggcactcgacctgctccagatggtagggaaagaaggaggctgccttcgtgatgtggtggcatataacacaatcatccatggcttctttaaggagtgcggaatagacaaggcatgccatctattccatgaaatgatgcggcaaggggttgtgccgactgtggtgacatacaacacagtaattgatgtgttgtgcaaggccggagaaatggacaaggcagagctagtctttcagcggatggctcgtaatggtgcgcagcccaataaagtgacatgtaatggcagtaaatttagttcactgactgacggatattgctcagtcggcaagatggataaaacattcaaactgcttgatgccatggtatcagctggaattgagcctgatgctgttacttatagtgcacttcttgatggctattttaaaaatggaaggatcgatgatggtttgactctatttagagaaatgccgtgcaagggagttaaaccaacaactgtgacatatggcatcatactggatggtttatatcgtgctgggagaactgctgctgccaagaaaatgtttgatcagatgatcaaaagtggaataacagtgaccgtttccatatacactactccctcctttccggtttataaggcatatttcaacttttttgtttttccaatt

SEQ ID NO: 2464 - DNA, 1308 bp, Triticum aestivum
atggttgatctctataattcaatgtcaagcaatggtattgtacccaatcgccaggttttcaacatattaattgatgcatatgctaagcgtggaatgacggatgaagctatgcttatatttactgaaatgcggggacaaggactgagtccagatgtatgcacctattcaactcttatatctgcacttagcagaacgggtaggctggcggatgccatggatagattcagtcagatgatttctattggcatacaaccagacgcagttgtttatcaagctctaattcagggttattgtacagttggtgatttggtgaaagcaaaggttttggtttctgaaatgatgaacagaggtattcctcctcctgacattgtgttctttaattcaataatgactagtctatgcaaagaaggaagggttacagatgcacacagtatccttgacttcgttatacactttggtgtgaggcctagcatcagtacatttaatttgctgattgacgggtattgcttagttggcaagatgaagaaagctttcggagtacttgataccatggcatcagttggcattgagcctgatgatatttcatatagtgcaatcattaatggctgttttaaaaatggaaggatcgatgatggatttaccatattccgagaaatgctgaagaaagttaaacctacaactgttacatataacatcatactgggtgggttattttgtgctgggaaaacagttgctgcaatgaaaatgttccatgagatgatcgaaagtggaataacagtgagcagttccacatacaggacagtccttggaggactttgcaggaatagttgtgaggacgaagcgatcaccctgttccagaaattaggagcaatgaatgtgaagttggatattgcaatactcaataccatgatcaatgcaatgttcaagcttcagagaagagaagaagctaacgatttgttttctgcagtatcagccagtggattggtacctaatgcttctacctatggtgtaatgataaaaaatcttctaagagaaggatcagtggaaaaagctgaaaatatgttctcattaatggagaagagcggttgtgctccggactctcgtcttataaatgatatcatcagaatattactgaagaaaggtgagattgtcaaggctggaaactatatgtctaaagttgatggcaggagcatctcacttgaagcttcaactacttcgttgatgatacgtctcttttcaagtgaagggaaatatcggggacaaataaatttgctccctgtaaagtaccaatttttcgatggagttagt

SEQ ID NO: 2465 - DNA, 1095 bp, Triticum aestivum
atggatagattcagtcagatgatttctattggcatacaaccagacgcagttgtttatcaagctctaattcagggttattgtacagttggtgatttggtgaaagcaaaggttttggtttctgaaatgatgaacagaggtattcctcctcctgacattgtgttctttaattcaataatgactagtctatgcaaagaaggaagggttacagatacacacagtatccttgacttcgttatacactttggtgtgaggcctagcatcagtacatttaatttgctgattgacgggtattgcttagttggcaagatgaagaaagctttcggagtacttgataccatggcatcagtaggcattgagcctgatgatatttcatatagtgcaatcattaatggctgttttaaaaatggaaggatcgatgatggatttaccatattccgagaaatgctgaagaaagttaaacctacaactgttacatataacatcatactgggtgggttattttgtgctgggaaaacagttgctgcaatgaaaatgttccatgagatgatcgaaagtggaataacagtgagcagttccacatacaggacagtccttggaggactttgcaggaatagttgtgaggacgaagcgatcaccctgttccagaaattaggagcaatgaatgtgaagttggatattgcaatactcaataccatgatcaatgcaatgttcaagcttcagagaagagaagaagctaacgatttgttttctgcagtatcagccagtggattggtacctaatgcttctacctatggtgtaatgataaaaaatcttctaagagaaggatcagtggaaaaagctgaaaatatgttctcattaatggagaagagcggttgtgctccggactctcgtcttataaatgatatcatcagaatattactgaagaaaggtgagattgtcaaggctggaaactatatgtctaaagttgatggcaggagcatctcacttgaagcttcaactacttcgttgatgatacgtctcttttcaagtgaagggaaatatcggggacaaataaatttgctccctgtaaagtaccaatttttcgatggagttagt

SEQ ID NO: 2466 - DNA, 1095 bp, Triticum aestivum; identical to SEQ ID NO: 2465

SEQ ID NO: 2467 - DNA, 1095 bp, Triticum aestivum; identical to SEQ ID NO: 2465

SEQ ID NO: 2468 - DNA, 1095 bp, Triticum aestivum; identical to SEQ ID NO: 2465

SEQ ID NO: 2469 - DNA, 1308 bp, Triticum aestivum; identical to SEQ ID NO: 2464

SEQ ID NO: 2470 - DNA, 1332 bp, Triticum aestivum
atggcccgggccttgccatcgccctcttcaaccgcatgtcccgaggcgctggtgcacgggtggtgtcgctgccgtgcaggccgcccggacttggtggttgccttctttggccgcctcctcagattggggctgtgcttgaatgtcatctccttgagcaacctcctcaaggggctctgccaggtcaagcgtacaaatgaggctgtggacttgctgctccaccggacacctgaactggactgtgtgcctaatgtcttctcgtacagcatcgtaatcaacggctgttttaaacaaggtgaagtagacaaagcgtgcaatctcttccatgggatgatccaactgggagttcaacctaatgtggtcatctacacctcaattatcgatgcactaagcaagtgcggagccatggacaaggcagaagtggtctttcggcaaatggttgataaaggtattggacccgatgtcatgacatgcactagtctgatccatggatattccatttcgggtaggtggaaggcggcagtaagggtattcaaagagatgataagtcttggtgttgtaccagataccgtcatgtggaactcatttgtggattcactttgcaagcatagaaggacaaaggaagctagagttatttttgactccatggctgcaaagggccagaaacctgatactgtctcctactctattatgcttaacgggtatgtgaaagaaggatgctttgatgatatgaccggtctcttcaattcgatgctacagaacggtgttgtacctaaccaccatattttcaacatactgatcaatgcatatgctaaacgtggactgatggatgaggctatgcacatgttcgaagtaatgaggcaacaaggagtaaacccagatgtagttgactatctagtagtaatggattcactttgcaaaatgggtaggatggatgctgctctggacaaatttaatcagatggtcaatcaaggagtttcacctaacaaagctgtttaccaatgcctggttctgggttcttgctctcatggtgattttgtgaaagccaaggaattgatttctgaagcacttaatagaggtctctgttctaacagtgtgttcttctatcctgtaataaacgacctgtgcaaagaaggaaaggtgaaggaggcacaggatatgtttgacttcattgtaggtattggtcagcggcccgatgtgattatgtacaattcactgatggatggatattgccttgttggcaaggtggaggaagcactgagagtacttgatgctatgaagtctgctggcctccaacctgatgctattatgtatggtatacttcttaatgatcac

SEQ ID NO: 2471 - DNA, 1332 bp, Triticum aestivum; identical to SEQ ID NO: 2470

SEQ ID NO: 2472 - DNA, 1332 bp, Triticum aestivum; identical to SEQ ID NO: 2470

SEQ ID NO: 2473 - DNA, 1317 bp, Triticum aestivum
atgatgagtctctttaattcaatggaaggcgatggtattgtagccaactcttatgttttcaacatattaattaatgcatatgctaaaggaggaatgatggatgaagctatgctcatacttactgaaatgcggggacaaggactgagtccggatgtattcacctattcaactctggtatctgcattttgcagaatgggtaggctagctgatgctatggataagttcagtcagatgattggtacgggagtacaaccaaacacagttgtttatcattccctagttcagggcttatgtacacatggtgatttggtgaaagcaaaggagttgatttctgaaatgatgaataaaggtatgattcgtccaaacattgcattcttcaattcaataatggacagtctatgcaatgaaggaagggttgtggatgcacaccatatctttgacttggttacagacataggtgagaaacctgatgtcattacatttagtacgctaattgacggatattgcttagtcggtgagatggagaaagcatgccgagtatttgatgccatggtatcagctggcattgagcctgatgtcattacgtatagtacacttgtcagtgggtattgtaaaagtggaaggatcgatgatgggttgattctgttcagagaaatgttgcataaggaagttaaacctacaactgttacatatggcaccgtactggatgggttatttcgtgcttggagatctgctgctgcaaagaaagtgttccatgagatgatcgaaagtggaataatggtgagcatttctatatataatataattcttggaggactttgtagaaataattgcgcagatgaagcgatcgtcctattccagaaattgtgtgcaatgaatgtgaagttcaatatcacaacactcaatatcatgcttaatgcattctacaaggttcaaagaagagatgaagctagtgatttgttcgctgcattaccagccagtgggttggtgcctaatgcttctacttatggagtaatgattcaaaatcttctaaaagaaggagcggtggaagaagctgacagtatgttctcatcaatggagaagagtggttgtgctcctagctctcgtttttcaaattgtatcatcagaacgttattggaacagggggagatagtcaaggctgggaaatatatgtctaaagttgatgggaagacttttttgcttgaagcttcaactacttcattgctgatgtccctcttttcaaggggaggcaaatatcaggagcacatactcttgctccctgcaaagtatcaatttttcagtggagtgaaccacagt

SEQ ID NO: 2474 - DNA, 1317 bp, Triticum aestivum
atgatgagtctctttaattcaatggaaggcgatggtattgtagccaactcttatgttttcaacatattaattaatgcatatgctaaaggaggaatgatggatgaagctatgctcatacttactgaaatgcagggacaaggactgagtccggatgtattcacctattcaactctagtatctgcattttgcagaatgggtaggctagctgatgctatggataagttcagtcagatgattggtacgggagtacaaccaaacacagttgtttatcattccctagttcagggcttatgtacacatggtgatttggtgaaagcaaaggagttgatttctgaaatgatgaataaaggtatgattcgtccaaacattgcattcttcaattcaataatggacagtctatgcaatgaaggaagggttgtggatgcacaccatatctttgacttggttacagacataggtgagaaacctgatgtcattacatttagtacgctaattgacggatattgcttagtcggtgagatggagaaagcatgtggagtatttgatgccgtggtatcggctggcattgagcctgatgtcattacgtatagtacacttgtcagtgggtattgtaaaagtggaaggatcgatgatgggttgattctgttcagagaaatgttgcataaggaagttaaacctacaactgttacatatggcaccgtactggatgggttatttcgtgcttggagatctgctgctgcaaagaaagtgttccatgagatgatcgaaagtggaataatggtgagcatttctatatataatataattcttggaggactttgtagaaataattgcgcagatgaagcgatcgtcctattccagaaattgtgtgcaatgaatgtgaagttcaatatcacaacactcaatatcatgcttaatgcattctacaaggttcaaagaagagatgaagctagtgatttgttggctgcattaccagccagtgggttggtgcctaatgcttctacttatggagtaatgattcaaaatcttctaaaagaaggagcggtggaagaagctgacagtatgttctcatcaatggagaagagtggttgtgctcctagctctcgtttttcaaattgtatcatcagaacgttattggaacagggggagatagtcaaggctgggaaatatatgtctaaagttgatgggaagactattttgcttgaagcttcaactacttcattgctgatgtccctcttttcaaggggaggcaaatatcaggagcacatactcttgctccctgcaaagtatcaatttttcagtggagtgaaccacagt

SEQ ID NO: 2475 - DNA, 1317 bp, Triticum aestivum; identical to SEQ ID NO: 2473

SEQ ID NO: 2476 - DNA, 1317 bp, Triticum aestivum; identical to SEQ ID NO: 2474

SEQ ID NO: 2477 - DNA, 1152 bp, Triticum aestivum
  misc_feature (1111)..(1111): n is a, c, g, or t
  misc_feature (1113)..(1113): n is a, c, g, or t
  misc_feature (1118)..(1118): n is a, c, g, or t
atgatgagtctctttaattcaatggaaggcgatggtattgtagccaactcttatgttttcaacatattaattaatgcatatgctaaaggaggaatgatggatgaagctatgctcatacttactgaaatgcggggacaaggactgagtccggatgtattcacctattcaactctggtatctgcattttgcagaatgggtaggctagctgatgctatggataagttcagtcagatgattggtacgggagtacaaccaaacacagttgtttatcattccctagttcagggcttatgtacacatggtgatttggtgaaagcaaaggagttgatttctgaaatgatgaataaaggtatgattcgtccaaacattgcattcttcaattcaataatggacagtctatgcaatgaaggaagggttgtggatgcacaccatatctttgacttggttacagacataggtgagaaacctgatgtcattacatttagtacgctaattgacggatattgcttagtcggtgagatggagaaagcatgccgagtatttgatgccatggtatcagctggcattgagcctgatgtcattacgtatagtacacttgtcagtgggtattgtaaaagtggaaggatcgatgatgggttgattctgttcagagaaatgttgcataaggaagttaaacctacaactgttacatatggcaccgtactggatgggttatttcgtgcttggagatctgctgctgcaaagaaagtgttccatgagatgatcgaaagtggaataatggtgagcatttctatatataatataattcttggaggactttgtagaaataattgcgcagatgaagcgatcgtcctattccagaaattgtgtgcaatgaatgtgaagttcaatatcacaacactcaatatcatgcttaatgcattctacaaggttcaaagaagagatgaagctagtgatttgttcgctgcattaccagccagtgggttggtgcctaatgcttctacttatggagtaatgattcaaaatcttctaaaagaaggagcggtggaagaagctgacartatgttctcatcaatggagaagagtggttgtgctcctagctctcgtcttntnaatgntgtatcatcagaactttattggaaaagggggaga

SEQ ID NO: 2478 - DNA, 1317 bp, Triticum aestivum; identical to SEQ ID NO: 2473

SEQ ID NO: 2479 - DNA, 1317 bp, Triticum aestivum; identical to SEQ ID NO: 2474

SEQ ID NO: 2480 - DNA, 1080 bp, Triticum aestivum
atggactgctgctgccgcgcagaccgcccggacttggtggttgccttcttcggccgcctcctcaggttggggctgcgcttgaatgtcatctccttcaacaacctcctcaaggggctttgccaggctaagcgctcaaatgaggcattggatctgctgctccaccggatgcccgaactggactgtgcgcctgatgtcttctcgttcaacatagtaatcaacggctgctttagagaaggtgaagtagacaaagcatgcaatctcttccatgagatgccccaactgggagttcaacctgatgtggtgacctacaactcaattatcatcgcactaagcagggccggagcaatgggtaaggcagaagtggtccttcggcaaatggttgataaaggcattggaccagatgtcatgacatataacagtctgatccatggatattctactttgggtcagtggaaggcagcagttagggtattcaaagagatggtaagtgttggtgttctaccaaatgctgtcacgttgaactcatttatggattcactttgcaagcatagaaggacaaaggaagctagagatatttttgactccatggctgcaaagggccacaaacctaatattgcctcctactctactatgcttaatgggtatgcgaaacaaggatgcttcgatgatatgactggtctcttcaattccatggtacagaatggtgttgtaccaaaccaccatattttcaacatactgatcaatgcatatgctaaacgtggactgatggatgaggctatgcacatgttcgaagtaatgaggcaacaaggagtaaacccagatgtatttagccatcaaattgtaatggattcactttgtaaaatgggtaggatggatgctgctctggacaaatttaatcagatggtcaatcaaggagtttcacctaacaaagctgtttaccaatgcctggttctgggttcttgttctcatggtcattttgtgaaagccaaggaattgatttctgaagcagttaatagaggtctgtgttctaacagtgtgttcttctatcctgtagtaaacgacctgtgcaaagaaggaagg

SEQ ID NO: 2481 - DNA, 1290 bp, Triticum aestivum
atgtctagaaatggtgttcaaccagatattgtaacttacagtatacagatggattatctttgcaagagcggaagatgcacagaagctaggaagatttttgattctatgatcagtttgggccaaaaaccgaccgttactacctacaacattctgcttcatgggtatgctatggaaagatctttttatgatatgaattgtctcattgagttgatggatgataatggtatttcaccagatcattatggctacaacatactcatatctgcttatgctaaagaagaaacggttggtgaggtaatgcatatatttacaaaaatgcggcagcaaggattgaaccctaatgttgtgaactatggagcggtaataaatttgctttctagtattggccgaatggatgatgctatgtcccaattcaatcaaatgataactgaagggttagctcctgatatcatagttttcaccccccttattagtggtttctgttcttgtggcaaatgggagaaggttcatgaactattttctgagatgttggatcgcggcatctatcctaataccgtgttcttcaccacagttatggaccgcctttgcaaaaatggaagggctatggaagcccgagatatctttgatctgatggtacacatgggtgtaaagcctgacgtgcgtagttatgccacactgatgcatggatactttttagttggtaagatggatgaagtgaggaagttacttgacaatatgtgctcaattggcatggaaccagatgttgtcacctatagcatactgattgatggttactctaagaatggaaggatagatgatgcatttgttgttttcaaggaattgttggaagggaaggttaagccttgtgttatcacttttaatattatgattggtgcattgcttaaatgtggcgggaaggcagaagccaaagatttgtttgacggtatctgggccaacggattagtgcccgacgttattacatatagcttaatgatacaaaaacttattgaagaaggttctctacaagagtctgatgatctcttcctttctatggagaagaatgggtgtgctgctgactcacgtatgctaaatgctatagttagaaggttacttcagagaggggagatgccaagggctgggacttatctgtctaaaattgacgaggggagcttcacccttgaagcttccacagctggcttattgactgcgcttgcttcaggggggaaatgtcaggaatataaggggttactgcctgaaaaatatcactcttttctggaacagggcactggt

SEQ ID NO: 2482 - DNA, 663 bp, Triticum aestivum
atgttgcgcaagggacttaaacctacaacttttaattacaacgtcatactggatggattatttctggctggacgaactgttgctgcaaaggaaaagtttgatgagatggttgaatctggagtaagtgtgtgcattgatacatattcgatagttcttggtggactttgtagaaataattgtagcggcgaagcaatcacgctattccagaaattaagcacaatggatgtgaaattcaatattataattgtcaatataatgattgatgccttctacagggttcagcgaaaccaagaagccaaggatttgtttgctgcagtatcagccaatggtttggtagctaatgtctttacctacaccataatgatgaaaaatcttataaaagaagggtcagtggaagaagctgacgatctctttttatcaatggagaagagcggctgtactgctgactcttatatgttaaatcttattgtcagaatgttactggaaaaaggagagctagtcaaggctgggaattatatgtctaaagttgatgcaaagagctactcacttgaagctgaaaccgtttcgctgcttatctctctcttttcagggaaagggaaatatagagaacacataggattgctccctacaaagtatcggtttcgtgaagaagcagccacagtt

SEQ ID NO: 2483 - DNA, 1296 bp, Triticum aestivum
atggctatcaagggcctgaaacctgacaacgtttcatatgctattcgccttcatgggtatgccaccgaaggatgcttcgttgatatgattaatctcttcaattcaatggaaagagactgcattcttcctgactgtcgtatcttcagcatactaatttatgcatatgctaaatctgggaagcttgataaggctatgctcatcttcaatgaaatgcagaaacaaggagtgagtccaaatgcagtcacatattcaaccgtaatagatgcattttgcaaaaagggtaggttggatgatgctgtgataaagtttaatcagatgattgatacaggagtacgaccggacacggctgtttatagttccctaatccagggattttgtacacgtggagatttggtgaaagcaaaggaattgcttactaaaatgatgaacaaaggtatacctccttctgatattaagttcttcagttcaatcatgcagaacctatgcacagaaggaagggtaacagaagcacgggatgtccttggcttgatagcgcacataggtatgaggcctaatgtttgcacatttaatatactgatcggtggatactgcctagtcggcaagatggaggatgcctcaaaaatatttgatgacatgatgtcatatggcttagaaccttctaatattacgtatggtatacttattaatggctattgcaaaaacttaaggattgacgatgggctgattctgttcaaagaaatgttgcgcaagggacttaaacctacaacttttaattacaacgtcatactggatggattatttctggctggacgaactgtttctgcaaaggaaaagtttgatgagatggttgaatctggagtaagtgtgtgcattgatacatattcgatagttcttggtggactttgtagaaataattgtagcggcgaagcaatcacgctattccagaaattaagcacaatggatgtgaaattcaatattacaattgtcaatataatgattgatgccttctacagggttcagcgaaaccaagaagccaaggatttgtttgctgcagtatcagccaatggtttggtagctaatgtctttacctacaccataatgatgaaaaatcttataaaagaagggtcagtggaagaagctgacgatctctttttatcaatggagaagagcggctgtactgctgactcttatatgttaaatcttatcgtcagaatgttactggaaaaaggagagctagtcaaggctgggaattatatgtctaaagttgatgcaaagagctactcacttgaagctaca

SEQ ID NO: 2484 - DNA, 1296 bp, Triticum aestivum; identical to SEQ ID NO: 2483

SEQ ID NO: 2485 - DNA, 663 bp, Triticum aestivum
atgttgcacaagggacttaaacctacaacttttaattacaacgtcatactggatggattatttctggctggacgaactgttgctgcaaaggaaaagtttgatgagatggttgaatctggagtaagtgtgtgcattgatacatattcgatagttcttggtggactttgtagaaataattgtagcggcgaagcaatcacgctattccagaaattaagcacaatggatgtgaaattcaatattataattgtcaatataatgattgatgccttctacagggttcagcgaaaccaagaagccaaggatttgtttgctgcagtatcagccaatggtttggtagctaatgtctttacctacaccataatgatgaaaaatcttataaaagaagggtcagtggaagaagctgacgatccctttttatcaatggagaagagcggctgtactgctgactcttatatgttaaatcttattgtcagaatgttactggaaaaaggagagctagtcaaggctgggaattatatgtctaaagttgatgcaaagagctactcacttgaagctgaaaccgtttcgctgcttatctctctcttttcagggaaagggaaatatagagaacacataggattgctccctacaaagtatcggtttcgtgaagaagcagccacagtt

SEQ ID NO: 2486 - DNA, 663 bp, Triticum aestivum; identical to SEQ ID NO: 2482

SEQ ID NO: 2487 - DNA, 1296 bp, Triticum aestivum; identical to SEQ ID NO: 2483

SEQ ID NO: 2488 - DNA, 1296 bp, Triticum aestivum; identical to SEQ ID NO: 2483

SEQ ID NO: 2489 - DNA, 663 bp, Triticum aestivum; identical to SEQ ID NO: 2482

SEQ ID NO: 2490 - DNA, 663 bp, Triticum aestivum; identical to SEQ ID NO: 2482

SEQ ID NO: 2491 - DNA, 663 bp, Triticum aestivum; identical to SEQ ID NO: 2482

SEQ ID NO: 2492 - DNA, 1317 bp, Triticum aestivum
atgccaaccgcccgcctgtcctccatctccacctcctccttcagggctccttcacgtaaaccacgagcccccctcgccgccttggctgccgccacggaacgcgttcgcgctggaacgctaagccgggaggacgcacaccacctgttcgacgaattgcaaggccaagccgccgccgtcccggaacgcgggctcaacaactttcttgccgcactagcccgtgctccgccctcatctgcctgcagcgatggtccgggccttgcctttgccctcttcaaccgcatgtcccgaggcgctggtgcacgggtggtgtcgcctacgctctgtacctattccatcctcatggactgctgctgccgcgcaggccgcccggacttggtggttgccttcttcggccgcctcctcaggttggggctgcgcttgaatgtcatctccttcaacaacctcctcaaggggctctgccaggccaagcgttcaaatgaggctttggacatgctgctccaccggatgcccgaacaggactgtgcgcctgatgtcttctcgttcaacatagtaatcaacggctgctttagagaaggtgaagtagacaaagcatgcaatctcttccatgagatgccccaactgggagttcaacctgatgtggtgacctacaactcaattatcatcgcactaagcagggccggggcaatgggtaaggcagaagtggtccttcggcaaatggttgataaaggcattggacccgatgtcatgacatataacagtctgatccatggatattctactttgggtcagtggaaggcagcagttagggtattcaaagagatggtaagtgttggtgttctaccaaatgctgtcacgttgaactcatttatggattcactttgcaagcatagaaggacaaaggaagctagagatatttttgactccatggctgcaaagggccacaaacctaatattgcctcctactctactatgcttaatgggtatgcgaaacaaggatgcttcgatgatatgactggtctcttcaattcgatgctacagaatggtgttgtaccaaaccaccatattttcaacatactgatcaatgcatatgctaaacgtggactgatggatgaggctatgcacatgttcgaagtaatgaggcaacaaggagtaaacccagatgtatttagctatcaaattgtaatggattcactttgtaaatgggtaggatggatgctgctctggacaaatttaatcagatggtcaatcaaggagtttcacctaacaaagctgtttaccaatgcctggttctgggttcttgttctcatggtcattttg

SEQ ID NO: 2493 - DNA, 1293 bp, Triticum aestivum
atgccaaccgcccgcctgtcctccatctccacctcctccttcagggctccttcacgtaaaccacgagcccccctcgccgccttggctgccgccacggaacgcgttcgcgctggaacgctaagccgggaggacgcacaccacctgttcgacgaattgcaaggccaagccgccgccgtcccggaacgcgggctcaacaactttcttgccgcactagcccgtgctccgccctcatctgcctgcagcgatggtccgggccttgcctttgccctcttcaaccgcatgtcccgaggcgctggtgcacgggtggtgtcgcctacgctctgtacctattccatcctcatggactgctgctgccgcgcaggccgcccggacttggtggttgccttcttcggccgcctcctcaggttggggctgcgcttgaatgtcatctccttcaacaacctcctcaaggggctctgccaggccaagcgttcaaatgaggctttggacatgctgctccaccggatgcccgaactggactgtgcgcctgatgtcttctcgttcaacatagtaatcaacggctgctttagagaaggtgaagtagacaaagcatgcaatctcttccatgagatgccccaactgggagttcaacctgatgtggtgacctacaactcaattatcatcgcactaagcagggccggggcaatgggtaaggcagaagtggtccttcggcaaatggttgataaaggcattggacccgatgtcatgacatataacagtctgatccatggatattctactttgggtcagtggaaggcagcagttagggtattcaaagagatggtaagtgttggtgttctaccaaatgctgtcacgttgaactcatttatggattcactttgcaagcatagaaggacaaaggaagctagagatatttttgactccatggctgcaaagggccacaaacctaatattgcctcctactctactatgcttaatgggtatgcgaaacaaggatgcttcgatgatatgactggtctcttcaattcgatgctacagaatggtgttgtaccaaaccaccatattttcaacatactgatcaatgcatatgctaaacgtggactgatggatgaggctatgcacatgttcgaagtaatgaagcaacaaggagtaaacccagatgtagttractatctagtagtaatggattcactttgcaaaatgggtaagatggctgctgctatggataaatttaatcagatgatcaatcaaggagtttcacctaacaaagctgtttaccaatgcctgggaaaa

SEQ ID NO: 2494 - DNA, 1236 bp, Triticum aestivum
atgagccgccgcatggtccgacgcgtcttggagcggaacatcgaggagcggtaccgcgcggggcacattggcaccgaggacgcactccacctgttcgacgaattgctccaggttgccgggccctcctcgacccgcgccatcaactgcctcctctacgttgtcggccgtgattgccctgctctcggcgtctccctcttcaaccgggtcgcaagagccaaggtgcccccacacaatgtcacctacagcatcctcatcggctgctgctgccatgcgggccggttagacctcggtttcgccgccatgggcaacatcattaagctgggttttgcggctgaagccatgttcagtttcagccacctactcagggccgtctgcgcggagaacaagaccagctatgcaatggacatcgcactccggcgaatgcccgagtttaactgcacaccgaatgttttctcctatagcattcttctcaaaggtctctgtgttgagaagagaagtcaagaggctcttgagcttattcacatgatggtcgatgctggaggtagctgccaacctaatgtggtgtcctatagcactgtagttgatggcctgttgaaagagggtgaggtgaacaaagcttacagcttactttgtgaaatgctacatcaggggatttcaccgaatgttgtgacgtatagctcaatcatctttagcatgtgcaaggttcaagcaatggataaggccgaggaggtccttcaacagatgtttgatacaggtattctgccaaatattactacatataatagtctgatacacggatattattcatcaggacagtgcgaagaggtggttcgtattttcaagaaaatgtctaggaatggtgttcagccagatattgcaacttacaacatacagatggattatctttgcaagagtagaagatttgcggaagctagaactatttttgattctatggccggtaaggaccaaaaaccgaatgttactagctgcagtattctgcttcatgcgtatgctatggaacagtcattccatgatatgcattgtctcattgaattgatggtagaaaatggtattgcaccagatcattctgtgtacaacatactgatagttgtatatgctaaggggaaaatggttgatgaggtaatgcatatatttacaaaaatgcggcagcaaggattgaacccaaatgctgcgaactatggaacagtaataaacttacagtattggccgaatgga

SEQ ID NO: 2495 - DNA, 1236 bp, Triticum aestivum; identical to SEQ ID NO: 2494

SEQ ID NO: 2496 - DNA, 1236 bp, Triticum aestivum; identical to SEQ ID NO: 2494

SEQ ID NO: 2497 - DNA, 1236 bp, Triticum aestivum; identical to SEQ ID NO: 2494

SEQ ID NO: 2498 - DNA, 1236 bp, Triticum aestivum; identical to SEQ ID NO: 2494

SEQ ID NO: 2499 - DNA, 1236 bp, Triticum aestivum; identical to SEQ ID NO: 2494

SEQ ID NO: 2500 - DNA, 1275 bp, Triticum aestivum
atgtccaacctccgcctcctccgccgcagctcctcctccatgtccaccaccacgtcgccgccctcgcgctcctggtccccccattcggcctttgccgcggccacagagcgcgtgcgcgccgggacgctcagccaagacgatgcacaccacctgttcgacgaattgctgcggcaggccaccccggtccacgagcgctccctcaacggcttcctcgccgccctcgcgcgtgctacgtcctctgccgcttgcatcagagatggtcccgccctcgccatcgccctcttcaatcgcgtgtgccgagaacaagccggcccgcgggtggcgcctctcacagtccacacctacggcatcctcatggaatgttgttgtcgggcgggtcacccggaattagggcttgccatattcagccgtcttctcaggacggggctcaagacaaacgagatagtcggcagcaccttcctcaagtgcctctcctacacaaaacggacggatgaggctctgaacgtgttgcttcataggatgcccgagctcggctgtgtgcctaatgccttctcatactccattgttctgaagagcttatgcgacaatagcatgagtcagcgggcgcttgacctgctccagaggatggcgaaagaaggaggtggctgcttccttaatgtggtgacatatagcacggtcatccatggcttctttaaggaaggtgaaataggcaaggcatgcagtctgttccatgaaatgatgcagcaagggattgagcccgatgtgtggacgtataactcgattattgatgcattgtgcaaggccagagcaatggacaaggcagagctagtccttcgtcagatggttgctaaaggtgctcaacccgatacagtgacatataattgcatgatcaatggatatgccacatctgggcggttgaaagaggctgctaaaatgttcagagaaatgaaaagccggggtgttacaccaaatattgttacctgcggctcgttaatgacttccctttgcaagcatggaagaagcaaagaagctagacaaatatttgattccatgactgccaaaggccacagagctaatgtcgtctcatactctattttgcttcatgggtatgccaatgaaggatgctttgctgatatgattgatctctttaattcaatgaaaagcaacggtattgcagccgactgccatgttttcaacatattaattaatggatatgctaaacgtggaatgatggatgaagctgtgctgatattactgaaatgcgggaaaaaggag

SEQ ID NO: 2501 - DNA, 1275 bp, Triticum aestivum; identical to SEQ ID NO: 2500

SEQ ID NO: 2502 - DNA, 1275 bp, Triticum aestivum; identical to SEQ ID NO: 2500

SEQ ID NO: 2503 - DNA, 1275 bp, Triticum aestivum; identical to SEQ ID NO: 2500

SEQ ID NO: 2504 - DNA, 1275 bp, Triticum aestivum; identical to SEQ ID NO: 2500

SEQ ID NO: 2505 - DNA, 1275 bp, Triticum aestivum; identical to SEQ ID NO: 2500

SEQ ID NO: 2506 - DNA, 1287 bp, Triticum aestivum
atggaacatgcctcaaaaatatttgatgatatgatgtcacatggcttagaaccttctaatattacgtatggtatacttattaatggctattgcaaaaatagaaggattgatgacgggcttattctgttcaaagagatgctgcacaagggacttaaacctacaacttttaattatagcttggacattgctatggacaaatttaaccagatggttgatatgggagtacgaccgaatgcaattgtttatcattccctaatccagggtttttgtacacatggggatttagtgaaagcaaaggaattggttgctgaaatgaggaacaaagctatgcgtcctcctgatattaagttcttccattcaataatgcagaacctatgcacggaaggaagggtaatagaagcacgagatatcctcgacttgatagtgcgcattggtatgaggcctgatgttcccatctttaatttactgatcggtggatactgcctagtccgcaagatggcagatgcatcaaaaatatttgatgatatggtgtcatatggtttagaaccttcaaatattacgtatggtatacttattaatggctattgcaaaaatagaaggattgatgaggggctgattctgttcaaagaaatgttgtgcaagggacttaaacctacaacttttaactataacgtcatactggatggattatttctggctggacgaactgttgctgcaaaggaaaagtttgatgagatggttgaatctggagtaagtgtgtgcattggtacatattcgatagttcttggtggactttgtagaaataattgtagcggcgaagcaatcacgctattccagaaattaagcacaatggatgtgaaattcaatattataattgtcattgatgctttctacaaggttcagcgaaaccaagaagccaaggatttgtttgctgcagtatcagccaatggtttggtagctaatgtctttacctacaccataatgatgaaaaatcttataaaagaagggtcagtggaagaagctgacgatctctttttatcaatggagaagagcagctgtactgctgactcttatatgttaaatcttatcgtcagaatgttactgggaaaaggagagatagtcaaggctgggaattatatatctaaaattgatgcaaagagctactcacttgaagctaaaactgtttcgctgcttatctctctcttttcagggaaagggaaatatagagaacacataggattgctccctgcaaagtatcggtttcgtgaagaagcagctacagttgtg

SEQ ID NO: 2507 - DNA, 1089 bp, Triticum aestivum
atgtcccgcctccgcccccgccgctcctccaccacgcccatgttccacctcctccgccgtagctcctcctctacctccacctccacccccaccttgcggccctcgcgttcctggtctccccacgccgcctttgccgccgccacggagcgcgtccgcgccgggacgctcagccctgaagacgcgcaccacctgttcgacgaattgctacggcaggccaccccggtccccagccgctccctggacggtttcattgccgccctcgcccgtgcgcccgcctccgccgcctgcatcagagatggtcccgccctcgcccttggcctcttcaaccgcgtctgccgtgatgaagccggcgcgcgggtggcaccacgcacaatcttcacttacggcatcctcatgaactgctgctgctgcgcacatcgcccggacctagggcttgccttattcggccgcttcctcaggacgggcatgaaggcaaatgaaatcattgccaccaccttcctcaagtgcctctgctccgccaaacgtacagatgaggctgtcaacttgctgcttcataggattcccgagcttggctgcgtgcgtaatgccttctcatactccattgttctgaagagcttttgcgagaatagcatgagtcagcgggggctcgacctgctccagatgatggcgaaagaaggaggcgcctgctcccccaacgtggtggcatatagcacggtcatccatggcttctttaaggaaggcgaaacaggcaaggcatgcaatctattccatgaaatgatgcagcaaggtgttgtgcccactgtggcgacatataactcgattattgatgcgttgtgcaaggccagagcaatggacaaggcagagatagtccttcggcagatggttgataatggtgctcaaccggataattggacatataattgcatgatccatggatattcgacatcagggcagttgagagaggctactaaaatgttaagaaaaatgacaacccggggtcttataccagatattgttacttgcagctcgctcatggcttccctttgcaagcatggaagaagcaaagaagcgtcagacttttttgttcca

SEQ ID NO: 2508 - DNA, 1089 bp, Triticum aestivum
atgtcccgcctccgcccccgccgctcctccaccacgcccatgttccacctcctccgccgtagctcctcctctacctccacctccacccccaccttgcggccctcgcgttcctggtctccccacgccgcctttgccgccgccacggagcgcgtccgcgccaggacgctcagccctgaagacgcgcaccacctgttcgacgaattgctacggcaggccaccccggtccccagccgctccctggacggtttcattgccgccctcgcccgtgcgcccgcctccgccgcctgcatcagagatggtcccgccctcgcccttggcctcttcaaccgcgtctgccgtgatgaagccggcgcgcgggtggcaccacccacaatcttcacttacggcatcctcatgaactgctgctgctgcgcacatcgcccggacctagggcttgccttattcggccgcttcctcaggacgggcatgaaggcaaatgaaatcattgccaccaccttcctcaagtgcctctgctccgccaaacgtacagatgaggctgtcaacttgctgcttcataggattcccgagcttggctgcgtgcgtaatgccttctcatactccattgttctgaagagcttttgcgagaatagcatgagtcagcgggggctcgacctgctccagatgatggcgaaagaaggaggcgcctgctcccccaacgtggtggcatatagcacggtcatccatggcttctttaaggaaggcgaaacaggcaaggcatgcaatctattccatgaaatgatgcagcaaggtgttgtgcccactgtggcgacatataactcgattattgatgcgttgtgcaaggccagagcaatggacaaggcagagatagtccttcggcagatggttgataatggtgctcaaccggataattggacatataattgcatgatccatggatattcgacatcagggcagttgagagaggctactaaaatgttaagaaaaatgacaacccggggtcttataccagatattgttacttgcagctcgctcatggcttccctttgcaagcatggaagaagcaaagaagcgtcagacttttttgttcca

SEQ ID NO: 2509 - DNA, 1089 bp, Triticum aestivum; identical to SEQ ID NO: 2507

SEQ ID NO: 2510 - DNA, 1089 bp, Triticum aestivum; identical to SEQ ID NO: 2507

SEQ ID NO: 2511 - DNA, 1089 bp, Triticum aestivum; identical to SEQ ID NO: 2507

SEQ ID NO: 2512 - DNA, 1089 bp, Triticum aestivum; identical to SEQ ID NO: 2508

SEQ ID NO: 2513 - DNA, 1299 bp, Triticum aestivum
atgtcacgccttcaggtccgctctttctccagccccgtttcctcacgcgccaacgatctgctgaccgaactccacggccatctgggcttcgggacgctcaggccagagctcgcgcaccaactgttcgacgaaatgctgcgccaacctgtcccagtatcagcgcgtgcactcaacggcttatttgctgccctcgcatgtgcgccgccctccgccgcctgcaccgacggccctgtcctcgccatccatcttttcaaccgcatggcccgagcaggctgccgcagggtgatagcactcaccagtcacacctacagcatactaattgaatgttgctgccgcgcgcgccgtccggacctagggccttccttcttcactcaccttctcaagacaggcgtcacggcagacatcgtaatctatagtggcttattcaagtgcctctgcgacttgaagtgcacagaggaggctttggatatgctgctccacagaatgccgaacgacgtaagtgatgccatctcctactcagtaattctcaagagtctttgcgacaacgggaggagccagcttgcgcttgacgtgctccatataatgaccaaaaaaggtgctgactactccccggatgtgtttgcatacaacatggtaatcgatggcttctttaaggaaggtgaagtaagcaaagcatgcgatctgttccatgaaatgatacaacagggggttgtgcccgatgtggcgatgtatacctccattatcaatgcgctatgcaaagcaagagcaatggacaaggcagaggtggttcttcaatcaatggttcataatggtgtccaaccagatgttgtgacatatactatcctgatccaaggatattcaactttgagacagttgaaagaagtcgctaggttgttgaaagtgatgagaagccaaggtgttatgccaagcgttgttacctacaactcactcatgacctgcctttgcaagaatggaagattcaaggaagctgtagaaattttttattcaatggctgtgaagggcctaaaacctaatgtcatctcatactctataatactccatggatacgctaaagaaggatcccttgttgccatgattgatctctatcagttgatggcagcagaaggggtcatacctgacctccattgtttcaacatactaattgctgcatatgctgaatatggaatgatggatgtggctatgcttttcttcgaagacatgttgaagcagggggtgaaccctaatgaagtcacaaattttgtctgtgatagctggattatgcaaaatgggcaggatgga

SEQ ID NO: 2514 - DNA, 1299 bp, Triticum aestivum
atgtcacgccttcaggtccgctctttctccagccccgtttcctcacgcgccaacgatctgctgaccgaactccacggccatctgggcttcgggacgctcaggccagagctcgcgcaccaactgttcgacgaaatgctgcgccaacctgtcccagtatcagcgcgtgcactcaacggcttatttgctgccctcgcatgtgcgccgccctccgccgcctgcaccgacggccctgtcctcgccatccatcttttcaaccgcatggcccgagcaggctgccgcagggtgataccactcaccagtcacacctacagcatactaattgaatgttgctgccgcgcgcgccgtccggacctagggccttccttcttcactcaccttctcaagacaggcgtcacggcagacatcgtaatctatagtggcttattcaagtgcctctgcgacttgaagtgcacagaggaggctttggatatgctgctccacagaatgccgaacgacgtaagtgatgccatctcctactcagtaattctcaagagtctttgcgacaacgggaggagccagcttgcgcttgacgtgctccatataatgaccaaaaaaggtgctgactactccccggatgtgtttgcatacaacatggtaatcgatggcttctttaaggaaggtgaagtaagcaaagcatgcgatctgttccatgaaatgatacaacagggggttgtgcccgatgtggcgatgtatacctccattatcaatgcgctatgcaaagcaagagcaatggacaaggcagaggtggttcttcgatcaatggttcataatggtgtccaaccagatgttgtgacatatactatcctgatccaaggatattcaactttgagacagttgaaagaagtcgctaggttgttgaaagtgatgagaagccaaggtgttatgccaagcgttgttacctacaactcactcatgacctgcctttgcaagaatggaagattcaaggaagctgtagaaattttttattcaatggctgtgaagggcctaaaacctaatgtcatctcatactctataatactccatggatacgctaaagaaggatcccttgttgccatgattgatctctatcagttgatggcagcagaaggggtcatacttgacctccattgtttcaacatactaattgctgcatatgctgaatatggaatgatggatgtggctatgcttttcttcgaagacatgttgaagcagggggtgaaccctaatgaagtcacaaattttgtctgtgatagctggattatgcaaaatgggcaggatgga

SEQ ID NO: 2515 - DNA, 1299 bp, Triticum aestivum; identical to SEQ ID NO: 2513

SEQ ID NO: 2516 - DNA, 1299 bp, Triticum aestivum; identical to SEQ ID NO: 2513

SEQ ID NO: 2517 - DNA, 1299 bp, Triticum aestivum; identical to SEQ ID NO: 2513

SEQ ID NO: 2518 - DNA, 1299 bp, Triticum aestivum; identical to SEQ ID NO: 2513

SEQ ID NO: 2519 - DNA, 1203 bp, Triticum aestivum
atggcccgagcaggccgtcgccaggcgacaacacccaccatttacacctacaacatactaatggagtgttgccaccgagcatgctgcccagacctagggcttgccttcttcggccgcctcctcaagacaggcatcccgacaaacatcattgactacagcagcttgttcaagtgcctctgtgacatgaagcgcacagaggaggctctgaacgtgctgctccataagatgcccgacgacctgcctaatgtcatctcctactcagtgattctcaagagcttctgcgacaatgggaggagccagcttgcgcttgatctgctccagatgatggccaaaaaaggcgctgaccactcccccgacgtgatgtcatataacatggtaattggtggcttctttaaggagggtgaagtaagcaaagcatgcgatctattccaagaaatgatacgacacgggattgtgcctactgaggtgacatatagctccattatcaatgcgctatgcaaagcaagagcaatggacaaggcagaggtggttcttcgatcaatggttcataatggtgcccaaccagatgctgtgacatataatagcttgatccaaggatattcaactttgggacagttgaaagaagtcgctaggttgttgaaagtgatgagaagccaaggtgttatgccaagcgttgttacctacaactcactcatgacctgcctttgcaagcatggaaaaaccaaagaagctgagaaaatattttattctatggccgtgaacggacgaaaacctgatgtcatctcatactctattttgctccatgggtacgctaaagaaggatccctcattgatatgattgatctctgtgagcggatgccaagagatggagttgtacccaacctccattgtttcaacatactgattaatgcatatgctaagcatggaatgatggatgtggccctgcttttcttcgaagatatgttgaagcaggtggtgaagcctaatgaattcacttatttaactgtgatatctgcattttgcaagatgggcaggatggatgatgcgatggaaaaattccgtgagatgattgatatgggagtaccagttgacacagaagtttacatgtgcatagttgagggttattttaaaaatggtgattcagtgaaagccaaggattttattaccaaaatgattccaaataggccacagaagggtaattat

SEQ ID NO: 2520 - DNA, 1284 bp, Triticum aestivum
atgttttctcctacactattcttttcaagtctctgcaacgagaaaagaagccaagaggctctcgagctgattcacatcatggttgaccatggaggtagttgccaacctaatgtggtgtcctataacactgtagttgatggcctgttgaaagagggtgaggcaggcaaggcttacagcctattttctgaaatgctgcgtcaggggatatcaccggatgttgtgacctgtagttcaatcatcgctggcatctgcaaggttcatgcgatggacaaggctgagcaggttcttcaacagatgcttgatagaggaattctgccaaatgttgctacatatactagtctaatacatggatattattcattaggacagtgcgaagaggtggatcgggttctcaaggaaatgtctagaaatggtgttcaaccaaatattgtaacttacaatatacagattgattatctttgcaagagtggaagatgtgcagaagctaggaagatttttgattctatgatcagtttgggccaaaaaccgactgttactacctacagtattctgcttcatgggtatgctatagaaaaatcttttcatcatatgcattgtctcattgatttgatggtggaaaatagtattgcaccagatcattttgtctacaacatactcatatctgcatatgctaaagaagaaatggttagtgaggtattgcatatatttacaaaaatgcggcagcaaggattgaaccctaatgtagcgagctacggtgtgataataaacttgctttccagtattggccgaatggatgatgctatgtccaaattcaatcaaatgataactgaaggattagctcctaatatcatagttttcagtaccgttattagtggtttttattcttgtggcgcatgggagagggttcatgaaatattttctgaaatgttgaatcgtggcatctatcctgctaccgtgttcttcaacataattatggaccacctttgcaaagagggaagggttatggaagcccaggatatcttcgacctgatggtacacatgggtgtgaagcctgtcgtccataattataaaacactgatacatggatactggtcagttagtaagatggatgaagtgagcaagttacttgacaatgtggtcttaattggcatggaaccagatgttgtcacctataacacactgattgacggttactctaagaatggaaggatagatgatgcattggttgttttcagggaaatgatggcgggaaggttaagccttctgttatcacttttactatta

SEQ ID NO: 2521 - DNA, 1239 bp, Triticum aestivum
atgtcccgcctccgccactcctccgccacgccgatctccagcctccgcctcctccgccacatctcctcttccacctccacccccacccccacgtcgccaacctcatgctcctggtcaccccatgccgcctttggcgcggccacggagcgtgtccgtgccgggacactcaggccggaagacgcacacaccctgttcgacgaattgcttcggcaggccacaccggtccccgagcgctccctcaacggcttccttgccgccctcgcccgcgcgcccgcctccggcaactgcatcagagatggccccgcccttgcagtggctctcttcagccgtgtgtgcagagaggaagccggcccgcaggtggcggcgctcacagtttgcacctacaacatcctcatggactgctgctgccgtgcgcgtcgcccggagctagggcttgccttatttggccgcttcctcaggaagggcctcaagacagaccagaccggcgccagcaccttcctcaagtgcctctgctacgcaaaacggacggatgaggcagtggacgttttgcttcataggatgtccgagcttgggtgtgtgcctgatgccatctcatacaacactgttctgaagagcttatgcgacaatggcatgagccagcgggggctcgaactgctccagctggtggcgggaaaaggaggtggctgcttccctgatgtggtggcgtatagcacggtcatccatggcttttttcaggagggtgaagcagggaaggcatgcagtctattccatgaaatgatgcagcaagggattgtgcccagtgtggtgacatatagctcgatcattgatgcgttgtgcaaggccagagcaatggacagggcagagctagtccttcggcagatggttgctaatggtgctcaacccgatacagtgacatataattgcatgatcaatggatatgccacatctgggcggttgaaagagtctgctaaaatgttcagagaaatgaaaagccggggtcttatgccagatattgttacttgcaactccttcctgtcctccctttgcaagcatggaagaagcaaagaagctgcagaattttttgattccatgaccgccaagggccacaaaccggatatcgtctcataccgtattttgcttcatgggtatgctactgaaggatgctttgctgatatgattgacctctttaatgcaatggaaaggaatggcattgcagccgactgcgtgttttcaacatat

SEQ ID NO: 2522 - DNA, 1239 bp, Triticum aestivum
atgtcccgcctccgccactcctccgccacgccgatctccagcctccgcctcctccgccacatctcctcttccacctccacccccacccccacgtcgccaacctcatgctcctggtcaccccatgccgcctttggcgcggccacggagcgtgtccgtgccgggacactcaggccggaagacgcacacaccctgttcgacgaattgcttcggcaggccacaccggtccccgagcgctccctcaacggcttccttgccgccctcgcccgcgcgcccgcctccggcaactgcatcagagatggccccgcccttgcagtggctctcttcagccgtgtgtgcagagaggaagccggcccgcaggtggtggcgctcacagtttgcacctacaacatcctcatggactgctgctgccgtgcgcgtcgcccggagctagggcttgccttatttggccgcttcctcaggaagggcctcaagacagaccagaccggcgccagcaccttcctcaagtgcctctgctacgcaaaacggacggatgaggcagtggacgttttgcttcataggatgtccgagcttgggtgtgtgcctgatgccatctcatacaacactgttctgaagagcttatgcgacaatggcatgagccagcgggggctcgaactgctccagctggtggcgggaaaaggaggtggctgcttccctgatgtggtggcgtatagcacggtcatccatggcttttttcaggagggtgaagcagggaaggcatgcagtctattccatgaaatgatgcagcaagggattgtgcccagtgtggtgacatatagctcgatcattgatgcgttgtgcaaggccagagcaatggacagggcagagctagtccttcggcagatggttgctaatggtgctcaacccgatacagtgacatataattgcatgatcaatggatatgccacatctgggcggttgaaagagtctgctaaaatgttcagagaaatgaaaagccggggtcttatgccagatattgttacttgcaactccttcctgtcctccctttgcaagcatggaagaagcaaagaagctgcagaattttttgattccatgaccgccaagggccacaaaccggatatcgtctcataccgtattttgcttcatgggtatgctactgaaggatgctttgctgatatgattgacctctttaatgcaatggaaaggaatggcattgcagccgactgcgtgttttcaacatat

SEQ ID NO: 2523 - DNA, 1239 bp, Triticum aestivum; identical to SEQ ID NO: 2522

SEQ ID NO: 2524 - DNA, 1239 bp, Triticum aestivum; identical to SEQ ID NO: 2522

SEQ ID NO: 2525 - DNA, 1239 bp, Triticum aestivum; identical to SEQ ID NO: 2522

SEQ ID NO: 2526 - DNA, 1239 bp, Triticum aestivum; identical to SEQ ID NO: 2522

SEQ ID NO: 2527 - DNA, 1173 bp, Triticum aestivum
atgggacacgtcattaagttgggatttgcagcacaagctgtcgtcaatttcagccacctactcaaggccatctgtgcggagaagaagaccagctatgcaatggacatcgtactccgagtaatccccatgtttaactgtgtgccggatgtcttctcctacagcattcttttcaagggtctttgcaacgaaaggagaagccaagaggctcttgagctgattcacatcatggtacagcatggaggtagctgccaacctaatgtggtgtcctatagcaccgtaattgatggcttgttgaaagagggtgagatgaacaaggcttacagtctattttgtgaaatgttacagtggggaatttcgccgaatgttgtgacctgtaattcaattatctctggcatgtgcaagcttcatgcaatggacaaggctgaggaggttcttcaacagatgcttgatagaggaattctgccaaatagtaccacatataatggcctgatacatgggtattattcactaggacagtgcgaagaggtgggtcggattttcaaggaaatgtctagaaatggtgttcaaccaaatattgtaacttacaatatacagatggattatctttgcaagagcggaagatgcgcagaagctaggaagatttttgattctatggtcagtttgggccaaaaaccagatgttactacctacggcattctgcttcatgggtatgctatggaacgatcttttcatgatattcattgtctcattgatttgatggtcggaaatggtctgtcaccaaataactatatctacagcatactcatatctgcatgtgctaaagaaaaaatggttgatgaggcaatgcatatatttacaaaaatgcagcagcaaggatttaaccctgatgtagtgagctatggaatggtgatagacttgctttccagtattggccgaatggatgatgctatgtcccaattcaatcaaatgataaccgaagggttagctcctgatatcatagtttcaacccccttattagtggtttctgttcttgtggcaaatgggagaaggttcatgaactattttctgagatgttggatcgcagcatctgtcccgacagagtgttcttcaacactgatatggatcacctttgcaaaagtggaagggttatggaagcccaggatatcttcgacc

SEQ ID NO: 2528 - DNA, 1173 bp, Triticum aestivum; identical to SEQ ID NO: 2527

SEQ ID NO: 2529 - DNA, 1218 bp, Triticum aestivum
atgacggatgaagctatgctcatatttacggaaatgcgggaaaaaggagtaggtcccgatgcgttcacctattccactgtaatagccgcactttccagaatgggtaggttgaccgatgctatgggcaagttaagtcagatgattgccatgggagttcaaccggacacagctgtttatcactccctgattcagggttgttgtatacatggtgatttggttaaagccaaggagctggtttctgaaatgatgaacaaaggtattcctcgtcctagcattgcgttcttcagttcagtgataaactatttatgcaaagaaggcagggttatggatgcacatgatatctttgaccttgttatagacatgggtgagaggcctgatgtcattacatttaattcactgattgacggatattgcttagttgataagatggataaagcactcagagtgcttgattccatggtatcatttggcattgagcctaatgtggttacatataatacacttgttaatggctactgtacaaacggaaggatcgatgatggtttgaccctgtttagagaaatgccgcataagagaattaaacctgacactgtaacatatggcatcatactggatgggttgtttcgttctgggagcactgttgctgctaggaaaatgttccatgagatgacggaaagtggaataacagtgagtatttccacatacagtataatacttggaggtttttgtagaaataattgtgcagacgaagctatcaccctgttccagaaattaggaacaatgaatgtgaagtttgatattgcaatactcaataccatgattaatgcaatgtacaaggttgggagaagagaagaagctaaggatttgtttgctgcaatatcacccagtagcttggtgcccaatgaatctacttatgcagtaatgataaaaattcttctaaaagacggagcagtggaagatgctgacaatatgttttcatcaatggacaacagtggtatcgttcccagttcccgtcttataaatgatatcatcagaatgttgttggaaaaaggtgagatagccaaggctggaaattatttgtctaaagttgatgggaagagtatctcacttgaagcttcaactgcctcattgatgttgtctctcttttcaaggaaagggaaacatcaggaggatattaagttgctccctgcaaagtatcaattttttgatggatttggt

SEQ ID NO: 2530 - DNA, 1218 bp, Triticum aestivum
atgacggatgaagctatgctcatatttacggaaatgcgggaaaaaggagtaggtcccgatgcgttcacctattccactgtaatagccgcactttccagaatgggtaggttgaccgatgctatgggcaagttaagtcagatgattgccatgggagttcaaccggacacagctgtttatcactccctgattcagggttgttgtatacatggtgatttggttaaagccaaggagctggtttctgaaatgatgaacaaaggtattcctcgtcctagcattgcgttcttcagttcagtgataaactatttatgcaaagaaggcagggttatggatgcacatgatatctttgaccttgttatagacatgggtgagaggcctgatgtcattacatttaattcactgattgacggatattgcttagttgataagatggataaagcactcagagtgcttgattccatggtatcatttggcattgagcctaatgtggttacatataatacacttgttaatggctactgtacaaacggaaggatcgatgatggtttgaccctgtttagagaaatgccgcataagagaattaaacctgacactgtaacatatggcatcatactggatgggttgtttcgttctgggagcactgttgctgctaggaaaatgttccatgagatgacggaaagtggaataacagtgagtatttccacatacagtataatacttggaggtctttgtagaaataattgtgcagacgaagctatcaccctgttccagaaattaggaacaatgaatgtgaagtttgatattgcaatactcaataccatgattaatgcaatgtacaaggttgggagaagagaagaagctaaggatttgtttgctgcaatatcacccagtagcttggtgcccaatgaatctacttatgcagtaatgataaaaattcttctaaaagacagagcagtggaagatgctgacaatatgttttcatcaatggacaacagtggtatcgttcccagttcccgtcttataaatgatatcatcagaatgttgttggaaaaaggtgagatagccaaggctggaaattatttgtctaaagttgatgggaagagtatctcacttgaagcttcaactgcctcattgatgttgtctctcttttcaaggaaagggaaacatcaggaggatattaagttgctccctgcaaagtatcaattttttgatggatttggt

SEQ ID NO: 2531 - DNA, 1218 bp, Triticum aestivum; identical to SEQ ID NO: 2529

SEQ ID NO: 2532 - DNA, 1218 bp, Triticum aestivum; identical to SEQ ID NO: 2529

SEQ ID NO: 2533 - DNA, 1218 bp, Triticum aestivum; identical to SEQ ID NO: 2529

SEQ ID NO: 2534 - DNA, 1218 bp, Triticum aestivum; identical to SEQ ID NO: 2529

SEQ ID NO: 2535 - DNA, 1233 bp, Triticum aestivum
atgcctcgcttctcctccaccacgtcaatgtcgtcactccgcctccgcctccccctccgcctgcacgcccgccactcctcctccgcctctcaaccctcacacagccagggctgggatccccacgccgccttcgccgccgccacggagcgtgcgcgctctggcagcctcaccccggcggacgcacaccacctgttcgacgaattgctgcggcaggccaatcctgtccaggagcgccccctcaacaactttctcgccgccctcgcccgcgcgccggccctcacggtcgccctcttcagcctcatatccaaaggcgcccgccgacgggtggcgcagccaaatgtcttcacctatggcgtccttatggactgctgctgccgtgcacaccgcccggatctggcactagcgttcttcggccgtttcctcaggacgggcctggaggcagaccaagtcgtcttcaacaccctcctcaagggcctttgccatgcaaagcaggcagatgaggccgtgaacgtgcttcttcacaggatgcctgacctgggctgcactcccaatgtggtggcgtacaacaccgtcatccatggcttctttagggaaggccaagtaggcaaggcatgcgatatgttccatggaatggcacataagggcgttatgcctaatgtggtgacatataactcggttattgatgcactgtgcaaggccagggccatggacaaagcagagacggtccttagtcaaatggtaaatgatggtgtcggacctaataatgtcacatatgatagcctcatccatggatattcctctttgggtaatttgaaggaggcggttagggtattcaaagagatgagtcggaggtttacaccagatgtcgttacctgcacctcactcatggccttcctttgcaagaatggaaaaagcaaagaagctgcagaaatttttgattcaatggccaccaagggcctgaaacgtgacaccgtttcatatgctattctccttcatgggtatgccactgaaggatgcttggttgacatgattaatctcttcaattcaatggcaacagactgtattctacctaactgtcatatcttcaatatactgattaatgcatatgctaaatctgggaagcttgataaggctatgcttatcttcaatgaaatgcagaaacaaggagtgagtccagatttaaccagatggttgatatgggagtacgaccgaatgcaattgtttatcattccc

SEQ ID NO: 2536 - DNA, 1233 bp, Triticum aestivum
atgcctcgcttctcctccaccacgtcaatgtcgtcactccgcctccgcctccccctccgcctgcacgcccgccactcctcctccgcctctcaaccctcacacagccagggctgggatccccacgccgccttcgccgccgccacggagcgtgcgcgctctggcagcctcaccccggcggacgcacaccacctgttcgacgaattgctgcggcaggccaatcctgtccaggagcgccccctcaacaactttctcgccgccctcgcccgcgcgccggccctcacggtcgccctcttcagcctcatatccaaaggcgcccgccgacgggtggcgcagccaaatgtcttcacctatggcgtccttatggactgctgctgccgtgcacaccgcccggatctggcactagcgttcttcggccgtttcctcaggacgggcctggaggcagaccaagtcgtcttcaacaccctcctcaagggcctttgccatgcaaagcaggcagatgaggccgtgaacgtgcttcttcacaggatgcctgacctgggctgcactcccaatgtggtggcgtacaacaccgtcatccatggcttctttagggaaggccaagtaggcaaggcatgcgatatgttccatggaatggcacataagggcgttatgcctaatgtggtgacatataactcggttattgatgcactgtgcaaggccagggccatggacaaagcagagacggtccttagtcaaatggtaaatgatggtgtcggacctaataatgtcacatataatagcctcatccatggatattcctctttgggtaatttgaaggaggcggttagggtattcaaagagatgagtcggaggtttacaccagatgtcgttacctgcacctcactcatggccttcctttgcaagaatggaaaaagcaaagaagctgcagaaatttttgattcaatggccaccaagggcctgaaacgtgacaccgtttcatatgctattctccttcatgggtatgccactgaaggatgcttggttgacatgattaatctcttcaattcaatggcaacagactgtattctacctaactgtcatatcttcaatatactgattaatgcatatgctaaatctgggaagcttgataaggctatgcttatcttcaatgaaatgcagaaacaaggagtgagtccagatttaaccagatggttgatatgggagtacgaccgaatgcaattgtttatcattccc

SEQ ID NO: 2537 - DNA, 1227 bp, Triticum aestivum
atgccatgccagcatccgccgtggcccgcgccggcgcgcccgaccacctgtgaattgtcacgactcacctccgccgccgctcgcgctgagctgattcccgcatccgccgccgccgcctctcctcttccacctcgctgccctcgagctgctgtgctcctggcgacgccgccaagcctccactccaccacgcccatgtcccgcatccgccttcgccgcagccgcctcttctcctcctgcgccaccaccccgccgcccgcaggctcctggtctccccacgccgccttcgccgcggccacagagcgcgccctcgccgggaagctcagcggggaggacgcacaccacctgttcgatgaattgctgcggcaggccaccccggtccccgagcgctccctcaacggattccttactgccctcgcccgtgcaccggactcctccactttcagaaatggccctgccctcgcccgtgcaccggactcctccactttcagaaatggccctgccctcgccatcgccctcttcaaccgcctgtgccgagaagaagccggctcgcgggtggcgtggcccacggtctgcacctacaacatcctcatggactgccgctgccgcacgcgtcgcccggatctagggcctgccttccttgggcgcctcctcaggacgggcctgaagacaaaccagatcgtcgccaacaccctcctcaagtgcctctgctacgccaaacggacggatgaggctgtcaatgtattgcttcacaagatgtccgagctcggctgtgtgcctgatgccatctcatacaacacagttcttaagagattatgtgaagatagcagaagccagggagcactcgacctgctccggacggtggcaaaagaaggaggtgttggctctctcgatgtggtatcccatggcactgtcatccatggcttctttaaggaaggcgaaacaggcaaggcatgcaatctattccatgaaatgacacaacaagggattgtgcccaatgtggtgacatataacttgattattgatgcgttgtgcaaggccagagcaatggacaaggcagagctgatccttcggcagatggttgataacggtgttcgacccgatacagttacttgcagctcgatcatgtcttccctttgcaagcatggaagaagcaaagaagctgcagaaatttttgactccatgactgccaaaggcctcaaagctgatgttttctcatattctgtttca

SEQ ID NO: 2538 - DNA, 1227 bp, Triticum aestivum; identical to SEQ ID NO: 2537

SEQ ID NO: 2539 - DNA, 672 bp, Triticum aestivum
atgccatgccagcatccgccgtggcccgcgccggcgcgcccgaccacctgtgaattgtcacgactcacctccgccgccgctcgcgctgagctgattcccgcatccgccgccgccgcctctcctctttcacctcgccgccctcgagctgctgtgctcctggcgacgccgccaagtctccactccaccacgcccatgtcccgcatccgccttcgccgcagccgcctcttctcctcctgcgccaccaccccgccgcccgcaggctcctggtctccccacgccgccttcgccgcggccacagagcgcgccctcgccgggaagctcagcggggaggacgcacaccacctgttcgatgaattgctgcggcaggccaccccggtccccgagcgccccctcaacggattccttactgccctcgcccgtgcaccggactcctccactttcagaaatggccctgccctcgcccgtgcaccggactcctccactttcagaaatggccctgccctcgccatcgccctcttcaaccgcctgtgccgagaagaagccggctcgcgggtggcgtggcccacggtctgcacctacaacatcctcatggactgctgctgccgcacgcgtcgcccggatctagggcctgccttccttgggcgcctcctcaggacgggcctgaagacaaac

SEQ ID NO: 2540 - DNA, 1227 bp, Triticum aestivum; identical to SEQ ID NO: 2537

SEQ ID NO: 2541 - DNA, 1101 bp, Triticum aestivum
atgccagtgatgcctcgcttctactccactacgcccatgccccgcctcctccgccgcctctcctccacctccacctccacctcggggccctcacgctgctgggatcccagcgccgccctcgccgcggccacagagcgggtccgcgccgggacgctcagcccggcagacgcacgccacctgttcgacgaattgctgcagcggccaaccccggtccctggtcaagccctgaacggcttcctcgccgcccttgcccgcgctccggcctccgccgcctgcggagacagccccgccctcgccgtgtctctcttcaaccgcctgtgccgagaagccagcccgcatgcgtcgcctcttacagtccacacctacagcatcctcatggactgctgctgccgcgcgcgtcgccctgacctggggcttgccttcttcggccgcctcctcaggacgggcctgaggacagacggcgtcgacgcatacgccctcatcaagtgcttctgcctcgcaaaacggacagacgaggctgtcagcgtgctgctccataggttgtctgaactcggctgtgtgcctgatgccttatcatactccgtcgttctgaaggtcttatgcgatgatagcaggagccagcgagcgctcgacctgctccggatgatgtcgaaagaaggaggtgtctgcgcccccaacgtggtgccatatagcacggtcatccacggcttctgcaaggaaggcaaagtaagcaaggcatgcgatctgttcaacaaaatggggcagcaaggagttaagcctaatgtggtgacatatacctcgataattgatgcgctgtgcaaggccagagcaatggacaaggcagagtcattccttcggcatatggtcgataatgatgttcgacccaacaacgtgacatataagtgtatcatccagggatattcctctttgggcttgtggaatgaggcagtaaaaatattcagagaaatgacaagccggggtcttatgctagatgatgttactcgcaactcattcgtggcctccctttgcaaccatggaagaagcaaggaagctgcggagattgcccatcagatgattgaaagtgaaactacagtgagcaac

SEQ ID NO: 2542 - DNA, 1101 bp, Triticum aestivum
atgccagtgatgcctcgcttctactccactacgcccatgccccgcctcctccgccgcctctcctccacctccacctccacctcggggccctcacgctgctgggatcccagcgccgccctcgccgcggccacagagcgggtccgcgccgggacgctcagcccggcagacgcacgccacctgttcgacgaattgctgcagcggccaaccccggtccctggtcaagccctgaacggcttcctcgccgcccttgcccgcgctccggcctccgccgcctgcggagacagccccgccctcgccgtgtctctcttcaaccgcctgtgccgagaagccagcccgcatgcgtcgcctcttacagtccacacctacagcatcctcatggactgctgctgccgcgcgcgtcgccctgacctggggcttgccttcttcggccggctcctcaggacgggcctgaggacagacggcgtcgacgcatacgccctcatcaagtgcttctgcctcgcaaaacggacagacgaggctgtcagcgtgctgctccataggttgtctgaactcggctgtgtgcctgatgccttatcatactccgtcgttctgaaggtcttatgcgatgatagcaggagccagcgagcgctcgacctgctccggatgatgtcgaaagaaggaggtgtctgcgcccccaacgtggtgccatatagcacggtcatccacggcttctgcaaggaaggcaaagtaagcaaggcatgcgatctgttcaacaaaatggggcagcaaggagttaagcctaatgtggtgacatatacctcgataattgatgcgctgtgcaaggccagagcaatggacaaggcagagtcattccttcggcatatggtcgataatgatgttcgacccaacaacgtgacatataagtgtatcatccagggatattcctctttgggcttgtggaatgaggcagtaaaaatattcagagaaatgacaagccggggtcttatgctagatgatgttactcgcaactcattcgtggcctccctttgcaaccatggaagaagcaaggaagctgcggagattgcccatcagatgattgaaagtgaaactacagtgagcaac

SEQ ID NO: 2543 - DNA, 1101 bp, Triticum aestivum; identical to SEQ ID NO: 2541

SEQ ID NO: 2544 - DNA, 1101 bp, Triticum aestivum; identical to SEQ ID NO: 2542

SEQ ID NO: 2545 - DNA, 1101 bp, Triticum aestivum; identical to SEQ ID NO: 2541

SEQ ID NO: 2546 - DNA, 1101 bp, Triticum aestivum; identical to SEQ ID NO: 2541

SEQ ID NO: 2547 - DNA, 1110 bp, Triticum aestivum
atgccagccgcccgcctgtcctccttcaaggctccttcacgagagcgccgacctcccctcgccgccttggctgccgccacggagcgcgtccgcgccggaacgctaagtcggcaggacgcgcaccacctgttcgacgaattgctgagccaagccgcgacagtcccagtacgcaagctgaacaactttcttgccgccctcgcccgtgcaccgccctcaactgcctgcagcgatggtccgggccttgccatcgccctcttcaaccgcatgtcccgaggcgctggtgcacgggtggtgtcgcccacgctctgtacctattccatcctcattgactgctgctgccgtgcacgccgcccggacttggtggttgccttcttcggccgcctcctcaggttggggctgctcttggaggtcatctccttcaacaatctcctcaaggggctttgccaggccaagcgctcaaatgaggctttggacatgctgctccaccggacacctgaactacactgtgcgcctgatgtcttctcgtacaacatagtaatcaacggctgcttgaaagaaggtgaagtagacaaagcgtgcaatctcttccatgagatgccccaactgggagttcaacctgatgtggtgacctacacctcaatcatggacgcactaagcaagtccggagcaatggacaaggcagaagtgctccttcggcaaatggttgatcaaggaattgaacccaatatcaagacatatagctatctgatccatggatattctacttttggtcagtggaaggaggcacttagggtattcaaagaaatggcaagtcttggtgttgtaccagacgttgtcacgttgacctcattaatcgattccctttgcaagcacagaaggacaaaggaagctagagaaatttttgactctatggctgcaaagggcctgaaacctaatatcgtctcctactctactatgcttaatgggtatgtcaaagaaggatccttcgaggatatgactgatctcttcaattcgatggtacggaatggtatcgtacctaaccaccatattttcaacatactgatcaatgcatatgctaaacgtggaggagtgaagtgcactgtaggtcct

SEQ ID NO: 2548 - DNA, 1068 bp, Triticum aestivum
atgtctcgcctccgtctccgcctcccccgcggcagctcctcccccaccacactgataccccgcctccggctcctccgccgctgctccacctccacctccacgtcgtcgccctcacgctcctggtctccccgagacgcctttgccgcggccacggagcgtgttcgcgccgggacgctcagcctggaagacgctcacaaactgttcgacgaattgctcggtcaggccaccccggtcccggagcgctccctgaacggcttccttgccgccctcgcccgcgcgcccgcctccggtgcctgcatcagagatggccccgcccttgcagtggctctcttcaaccgtgtgtgcagagaggaagccggcgcgcaggtggcggcgctcacagtttgcacctacaacatcctcatggactgctgctgccgtgcgcgtcgtccggacctagggcttgccttatttggctgcttcctcaggaagggcctgaagacagaccagaccggcgccaacaccttcctcaagtgcctctgctacgcgaaacggacggatgaggctgtgaacgtgctcctccacaggatgtccgagctcggctgtgtgcctaatgccgtttcgtacaacactgttctgaagggcttatgcgacaatagcatgagtcagcgggcgctcgacctgctccagatggtggcgggaaaaggaggtggctgcttccctgatgtggtggcgtatagcacggtcatccatggcttttttaaggagggtgaaacagggaaggcatgcagtctattccatgaaatgatgcagcaagggattgtgcccagtgtggtgacatataactcgattattgatgcgttgtgcaaggtcagagaagtggacaaggcagagctagtccttcgtcagatggttgctaaaggtgctcaacccgatacagtgacatataattgcatgatcaatggatatgccacatctgggcggttgaaagccggggtcttacaccaaatgttgttacttgcaactcgttcctggcctccctttgcaagcaccgaagtagcaaagaagctgcagaattttttgattcca

SEQ ID NO: 2549 - DNA, 993 bp, Triticum aestivum
atggcgccaaatcattttgtctacaacatactcatatctgcatatggtcaagaagaaacggttggtgaggtaatgcatatatttacaaaaatgcggcaggaaggattgaaccctgatgttgcgaactatggagcggtaataaacttgctttctagtatcggccgaatggatgatgctaagtcccaatacaatcaaatgataactgaaggattactccctggtatcattgttttcaccccccttattagtggtttctgttcttgtggcaaatgggagaaggttcctgaactattttctgagatgttggatcgcggcatctgtcccaatacagtgttcttcaacgcaattatggatcgcctttgcaaaaatggaagggttatggaagcccaggatctcttcgacctgatggtacacatgggtgtgaagcctgatgtgtgtacttataacacactgataggtggatacttgttcgttggtaagatggatgaagtaaggaagttacttgacaatatggtctcaattggcttgaaaccagatgttatcacatatagcatactgattgatggttactctaagaatggaaggatagatgatgcattggttgtttccagggaaatgttggccgggaaggttaagccttgtgttatcacttttaatattatgattggtgcattgcttaaatgtggcaggaaggcagaaaccaaagatttgtttgacggtatctgggccaacggattagtgcccgacgttattacatatagcttaatgatacaaaaacttattgaagaaggttctctacaagagtctgatgatctattcctttctatggagaagaatggatgtgttgccgactcccatatgctaaatgctatagttagaagcttacttcggaaaggggaggtgcccagggctgggacttatctatctaaaattgatgagagggtgttcacccttgaagcttccacttgcttcaggggggaaaggccaagaata

SEQ ID NO: 2550 - DNA, 1233 bp, Triticum aestivum
atgtgggccagccacctgttggacccacatgtcatagacacaaaggtaggtgccttaatgcacggaagcatcgtcccctctgcgcgcgcctcccgacagctcacgcgccagagtgtcccgcatccgccgccggtcaccctcctcctcctcctcctcctctacctagccgacgtccggcttccgcctccgctgctcctccacttcatcacgctgatgtccagcatccacctccgccactgctccactatgcccatgtcccacgtctgcctccgccgccgcctttcctcatcctcctcctccttctccaactgcacctcgccgccctcaccaccctggtctccccacgccgcatttgccgcggccacagagcgtgtacgagccaggacgctcagcccggaagacgcacaccacctgttcgacgtattgtttcagcaggccactccggtccccgagcgctcccttgatggattccttgcagcactcagccgcgctacgccctctgaagcctgcggagacggccccgccctcgccctcaccctcttcaaccgtgtctgccgagaagaagccgggatgcaggtggtgccgcccaccatcttcacctacggcatcctcatgaactgctgctgccgcgaacgtcgtccggacctagggcttgccttctttgggcgcatcctcaaggctggcctgaagacaaacctgatcaccgccaacaccgtcctcaagtgcctctactgcgcaaaacataccgacgaggctgtcgatatgctgcttcataggatgtccgaccttggctgtgtgcctgatgacttctcatacaacacagttctccacggcttctttaaggaaggaaaaataggcaaggcctgcaatctattccatgaaatgatgctgcaagggtttgtccctgatgtggtgacatataacttgattattgaagcattgtgcaaggcccgagcaatggacaatgcagagttgttcctacggcagatggttgataacgttgttccaccggataaagtgacatatactagcatgatccatggatattccactttgggccggtggaaagaggcgactaaaatgttcagagagatgacaagcaggggtcttatacctaatattgtcacatggagctcgttcatggactccctttgcaagcatgggaaaagcaaagaagctgcagaaattttcttttccatggctggaaagggccataagcctaatatcgtctcc

SEQ ID NO: 2551 - DNA, 1014 bp, Triticum aestivum
atgtccagcatccacctccgccactgctccactatgcccatgtcccacgtctgcctccgccgccgcctttcctcatcctcctcctcctccaactgcacctcgccgccctcaccaccctggtctccccacgccgcatttcccgcggccacagagcgtgtacgagccaggacgctcagcccggaagacgcacaccacctgttcgacgtattgtttcagcaggccactccggtccccgagcgctcccttgatggattccttgcagcactcagccgcgctacgccctctgaagcctgcggagacggccccgccctcgccctcaccctcttcaaccgtgtctatcgagaagaagccgggatgcaggtggtgccgcccaccatcttcacctacggcatcctcatgaactgctgctgccgcgaacgtccggacctagggcttgccttctttgggcgcatcctcaaggctggcctgaagacaaacctgatcgccgccaacaccgtcctcaagtgcctctactgcgcaaaacataccgacgaggctgtcgatatgctgcttcataggatgtccgaccttggctgtgtgcctgatgacttctcatacaacacagttctccacggcttctttaaggaaggaaaaataggcaaggcccgcaatctattccatgaaatgatgctgcaagggtttgtccctgatgtggtgacatataacttgattattgaagcattgtgcaaggcccgagcaatggacaatgcagagttgttcctacggcagatggttgataacgttgttccaccagataaagtgacatatactagcatgatccatggatattccactttgggccggtggaaagaggcgactaaaatgttcagagagatgacaagcaggggtcttatacctaatattgtcacatggagctcgttcatggactccctttgcaagcatgggaaaagcaaagaagctgcagaaattttcttttccatggctggaaagggccataagcctaatatcgtctcc

SEQ ID NO: 2552 - DNA, 1014 bp, Triticum aestivum; identical to SEQ ID NO: 2551

SEQ ID NO: 2553 - DNA, 1020 bp, Triticum aestivum
atgtccagcatccacctccgccactgctccactatgcccatgtcccacgtctgcctccgccgccgcctttcctcatcctcctcctccttctccaactgcacctcgccgccctcaccaccctggtctccccacgccgcatttgccgcggccacagagcgtgtacgagccaggacgctcagcccggaagacgcacaccacctgttcgacgtattgtttcagcaggccactccggtccccgagcgctcccttgatggattccttgcagcactcagccgcgctacgccctctgaagcctgcggagacggccccgccctcgccctcaccctcttcaaccgtgtctgccgagaagaagccgggatgcaggtggtgccgcccaccatcttcacctacggcatcctcatgaactgctgctgccgcgaacgtcgtccggacctagggcttgccttctttgggcgcatcctcaaggctggcctgaagacaaacctgatcaccgccaacaccgtcctcaagtgcctctactgcgcaaaacataccgacgaggctgtcgatatgctgcttcataggatgtccgaccttggctgtgtgcctgatgacttctcatacaacacagttctccacggcttctttaaggaaggaaaaataggcaaggcctgcaatctattccatgaaatgatgctgcaagggtttgtccctgatgtggtgacatataacttgattattgaagcattgtgcaaggcccgagcaatggacaatgcagagttgttcctacggcagatggttgataacgttgttccaccggataaagtgacatatactagcatgatccatggatattccactttgggccggtggaaagaggcgactaaaatgttcagagagatgacaagcaggggtcttatacctaatattgtcacatggagctcgttcatggactccctttgcaagcatgggaaaagcaaagaagctgcagaaattttcttttccatggctggaaagggccataagcctaatatcgtctcc

SEQ ID NO: 2554 - DNA, 1014 bp, Triticum aestivum; identical to SEQ ID NO: 2551

SEQ ID NO: 2555 - DNA, 1176 bp, Triticum aestivum
atgcacggaagcatcgtcccctctgcgcgcgcctcccgacagctcacgcgccagagtgtcccgcatccgccgccggtcaccctcctcctcctcctcctcctctacctagccgacgtccggcttccgcctccgctgctcctccacttcatcacgctgatgtccagcatccacctccgccactgctccactatgcccatgtcccacgtctgcctccgccgccgcctttcctcatcctcctcctccttctccaactgcacctcgccgccctcaccaccctggtctccccacgccgcatttgccgcggccacagagcgtgtacgagccaggacgctcagcccggaagacgcacaccacctgttcgacgtattgtttcagcaggccactccggtccccgagcgctcccttgatggattccttgcagcactcagccgcgctacgccctctgaagcctgcggagacggccccgccctcgccctcaccctcttcaaccgtgtctgccgagaagaagccgggatgcaggtggtgccgcccaccatcttcacctacggcatcctcatgaactgctgctgccgcgaacgtcgtccggacctagggcttgccttctttgggcgcatcctcaaggctggcctgaagacaaacctgatcaccgccaacaccgtcctcaagtgcctctactgcgcaaaacataccgacgaggctgtcgatatgctgcttcataggatgtccgaccttggctgtgtgcctgatgacttctcatacaacacagttctccacggcttctttaaggaaggaaaaataggcaaggcctgcaatctattccatgaaatgatgctgcaagggtttgtccctgatgtggtgacatataacttgattattgaagcattgtgcaaggcccgagcaatggacaatgcagagttgttcctacggcagatggttgataacgttgttccaccggataaagtgacatatactagcatgatccatggatattccactttgggccggtggaaagaggcgactaaaatgttcagagagatgacaagcaggggtcttatacctaatattgtcacatggagctcgttcatggactccctttgcaagcatgggaaaagcaaagaagctgcagaaattttcttttccatggctggaaagggccataagcctaatatcgtctcc

SEQ ID NO: 2556 - DNA, 663 bp, Triticum aestivum
atgcaggtggtgccgcccaccatcttcacctacggcatcctcatgaactgctgctgccgcgaacgtcgtccggacctagggcttgccttctttgggcgcatcctcaaggctggcctgaagacaaacctgatcaccgccaacaccgtcctcaagtgcctctactgcgcaaaacataccgacgaggctgtcgatatgctgcttcataggatgtccgaccttggctgtgtgcctgatgacttctcatacaacacagttctccacggcttctttaaggaaggaaaaataggcaaggcctgcaatctattccatgaaatgatgctgcaagggtttgtccctgatgtggtgacatataacttgattattgaagcattgtgcaaggcccgagcaatggacaatgcagagttgttcctacggcagatggttgataacgttgttccaccggataaagtgacatatactagcatgatccatggatattccactttgggccggtggaaagaggcgactaaaatgttcagagagatgacaagcaggggtcttatacctaatattgtcacatggagctcgttcatggactccctttgcaagcatgggaaaagcaaagaagctgcagaaattttcttttccatggctggaaagggccataagcctaatatcgtctcc

SEQ ID NO: 2557 - DNA, 1221 bp, Triticum aestivum
atggctatgaagggcctgaaacctgacaacgtttcatatgctattctccttcatgggtatgccaccgaaggatgcttagttgatatgattaatctcttcaattcaatggaaagaaactgtattctacctgactgttgtatcttcaacatactgattaatgcatatgctaaatctgggaagcttgataaggctatgcttatcttcaatgaaatgcagaaacaaggagtgagtccagatgcagtcacatatttacccgtaatagatgcattttgcaaaaagggtaggttggacgatgctatgattatgtttaatcagatgattgatacgggagtacgaccagacacagctgtttatacttccctaatccaaggtttttgtacacacggcgatttggtgaaagcaaaggaattggttactgaaatgatgaacaaaggtatacctcctcctgatattaagttcttccattcaatcatgcagaacctatgcacagaaggaagggtaatagaagcacgggatatccttggcttgatagcacacataggtatgaggcctaatgtttgcacatttaatatactgattggtggatactgcctagtccgcaagatggaggatgcctcaaaaatatttgatgatatgatgtcatatggtttagaaccttctaatattacttatggtatacttattaatggctattgcaaaaacttaaggattgacgatgggctgattctgttcaaagaaatgttgcgcaagggagttaaacctacaacttttaattataacgtcatactggatgggttatttctggctggacgaactgttgctgcaaaggaaaagtttcatgagatggctgaatctggagcagatgtgtgcattgatacatactgtatagttcaccgcagccagcacaagaagaggcatggccggaatgaggctcggccaccgggaggacgccggacagccggatgcacgagggcccatagcaccaccacggccagtccaagaggaggcctggccgggacgaggtcctgccgtcgggaggacgccggacagccaggccacgggaatgggtggccaggcgaggtggagcgcatgggagggtgggaggaggaggatgcgtcgcaccgggcagtgccggcgacgatggcaaggaggagccgcggaggcgatcccagatccgccaccaggaggggtcgcggggaggagcaccgccatgacgaccac

SEQ ID NO: 2558 - DNA, 1221 bp, Triticum aestivum; identical to SEQ ID NO: 2557

SEQ ID NO: 2559 - DNA, 1221 bp, Triticum aestivum; identical to SEQ ID NO: 2557

SEQ ID NO: 2560 - DNA, 1221 bp, Triticum aestivum; identical to SEQ ID NO: 2557

SEQ ID NO: 2561 - DNA, 1221 bp, Triticum aestivum
atggctatgaagggcctgaaacctgacaacgtttcatatgctattctccttcatgggtatgccaccgaaggatgcttagttgatatgattaatctcttcaattcaatggaaagaaactgtattctacctgactgttgtatcttcaacatactgattaatgcatatgctaaatctgggaagcttgataaggctatgcttatcttcaatgaaatgcagaaacaaggagtgagtccagatgcagtcacatatttacccataatagatgcattttgcaaaaagggtaggttggacgatgctatgattatgtttaatcagatgattgatacgggagtacgaccagacacagctgtttatacttccctaatccaaggtttttgtacacacggcgatttggtgaaagcaaaggaattggttactgaaatgatgaacaaaggtatacctcctcctgatattaagttcttccattcaatcatgcagaacctatgcacagaaggaagggtaatagaagcacgggatatccttggcttgatagcacacataggtatgaggcctaatgtttgcacatttaatatactgattggtggatactgcctagtccgcaagatggaggatgcctcaaaaatatttgatgatatgatgtcatatggtttagaaccttctaatattacttatggtatacttattaatggctattgcaaaaacttaaggattgacgatgggctgattctgttcaaagaaatgttgcgcaagggagttaaacctacaacttttaattataacgtcatactggatgggttatttctggctggacgaactgttgctgcaaaggaaaagtttcatgagatggctgaatctggagcagatgtgtgcattgatacatactgtatagttcaccgcagccagcacaagaagaggcatggccggaatgaggctcggccaccgggaggacgccggacagccggatgcacgagggcccatagcaccaccacggccagtccaagaggaggcctggccgggacgaggtcctgccgtcgggaggacgccggacagccaggccacgggaatgggtggccaggcgaggtggagcgcatgggagggtgggaggaggaggatgcgtcgcaccgggcagtgccggcgacgatggcaaggaggagccgcggaggcgatcccagatccgccaccaggaggggtcgcggggaggagcaccgccatgacgaccac

SEQ ID NO: 2562 - DNA, 1215 bp, Triticum aestivum
atggctatgaagggcctgaaacctgacaacgtttcatatgctattctccttcatgggtatgccaccgaaggatgcttagttgatatgattaatctcttcaattcaatggaaagaaactgtattctacctgactgttgtatcttcaacatactgattaatgcatatgctaaatctgggaagcttgataaggctatgcttatcttcaatgaaatgcagaaacaaggagtgagtccagatgcagtcacatatttacccataatagatgcattttgcaaaaagggtaggttggacgatgctatgattatgtttaatcagatgattgatacgggagtacgaccagacacagctgtttatacttccctaatccaaggtttttgtacacacggcgatttggtgaaagcaaaggaattggttactgaaatgatgaacaaaggtatacctcctcctgatattaagttcttccattcaatcatgcagaacctatgcacagaaggaagggtaatagaagcacgggatatccttggcttgatagcacacataggtatgaggcctaatgtttgcacatttaatatactgattggtggatactgcctagtccgcaagatggaggatgcctcaaaaatatttgatgatatgatgtcatatggtttagaaccttctaatattacttatggtatacttattaatggctattgcaaaaacttaaggattgacgatgggctgattctgttcaaagaaatgttgcgcaagggagttaaacctacaacttttaattataacgtcatactggatgggttatttctggctggacgaactgttgctgcaaaggaaaagtttcatgagatggctgaatctggagcagatgtgtgcattgatacatactgtatagttcaccgcagccagcacaagaagaggcatggccggaatgaggctcggccaccgggaggacgccggacagccggatgcacgagggcccatagcaccaccacggccagtccaagaggaggcctggccgggacgaggtcctgccgtcgggaggacgccggacagccaggccacgggaatgggtggccaggcgaggtggagcgcatgggagggtgggaggaggaggatgcgtcgcaccgggcagtgccggcgacgatggcaaggaggagccgcggaggcgatcccagatccgccaccaggaggggtcgcggggaggagcaccgccatgac

SEQ ID NO: 2563 - DNA, 1173 bp, Triticum aestivum
atgtacatttcaagtttggacctgaaatttttaggagttgtagccacattccttgcgaacattcacattttattccgaaatttttggaaatatttaagatatatttttaaacatggagcaccgggagtatataaggatggaagtaccagatattctcccggccgtgcccatcccatgcctcgcctctaccccaccacgcccatgctccgcctcctccccctgccttcacgccgctgggatccccgcggggcctttgcctcagccacggagcgcgcccgcgccgggacgctcagccctgaagacgcacaccacctgttcgacgaattgctactacaggccaaccccgtccccgagcgctccctcaacggcttccttgccgcgctcgcccgcgctccgtcctccgctgctctcagagatggaccctcccttgctctcggcctcttcaaccgcgtctgccgagaagaagcaggaccgcgggtggtgccgcccacagtctgcacatacaacatcctcatggacagctgctgccgtgcacgccgtccggacctaggccttgccttcttcgaccgcttcctcaggatgggcctcaaggcagaccagatcgtcgccaacaacctcctcaagtgcctctgccacgcaagacggacacatgaggctatcaacgtgctgcttcataggatgtctgagttcggatgtgtgcctaatgtcatctcatactctatagtacttaagagcttatgtgacgatagcaggagccagcaagcgttcgacctgctccagatggtgaggaaagaaggaggtgccggctccctcaatgtggtggcgtatagcacagtgattcatgctttctttaaggaaggggaagcaagcaaggcatgtgatctattccatgagatgatgcagcaagggattgtgcctaatgtggtgacatatagctcgattattgatgccttgtgcaaggtcagggcaatggacaaggcaaagttggtccttcagcagatggttgataatggtgttcgaccaaatatgtatacatggaactcattcatgtactccctttgcaagaatggaagaagcaaagaagctgcagaattttttgactccatgacccccaagggccttaaacctaatatcgtcgtgtactctactcttcttcacgggtatgctagcgaa

SEQ ID NO: 2564 - DNA, 1173 bp, Triticum aestivum; identical to SEQ ID NO: 2563

SEQ ID NO: 2565 - DNA, 1173 bp, Triticum aestivum; identical to SEQ ID NO: 2563

SEQ ID NO: 2566 - DNA, 1173 bp, Triticum aestivum; identical to SEQ ID NO: 2563

SEQ ID NO: 2567 - DNA, 1173 bp, Triticum aestivum; identical to SEQ ID NO: 2563

SEQ ID NO: 2568 - DNA, 1173 bp, Triticum aestivum; identical to SEQ ID NO: 2563

SEQ ID NO: 2569 - DNA, 1173 bp, Triticum aestivum
atgtacatttcgagtttggacctgaaatttttaggagttgtagccacattccttgcgaacattcacattttattccgaaatttttggaaatatttaagatatgtttttaaacatggagcaccgggagtatataaggatggaagtaccagatattctcccggccgtgcccatcccatgcctcgcctctaccccaccacgcccatgctccgcctcctccccctgccttcacgccgctgggatccccgcggggcctttgcctcagccacggagcgcgtccgcgccgggacgctcagccctgaagacgcacaccacctgttcgacgaattgctactacaggccaaccccgtccccgagcgctccctcaacggcttccttgccgcgctcgcccgcgctccgtcctccgctgctctcagagatggaccctcccttgctctcggcctcttcaaccgcgtctgccaagaagaagcaggaccgcgggtggtgccgcccacagtctgcacatacaacatcctcatggacagctgctgccgtgcacgccgtccggacctaggccttgccttcttcggccgcttcctcaggatgggcctcaaggcagaccagatcgtcgccaacaacctcctcaagtgcctctgccacgcaagacggacagatgaggctatcaacgtgctgcttcataggatgtctgagttcggatgtgtgcctaatgtcatctcatactctatagtacttaagagcttatgtgacgatagcaggagccagcaagcgttcgacctgctccagatggtgaggaaagaaggaggtgccggctccctcaatgtggtggcatatagcacagtgattcatgctttctttaaggaaggggaagcaagcaaggcatgtgatctattccatgagatgatgcagcaagggattgtgcctaatgtggtgacatatagctcgattattgatgccttgtgcaaggtcagggcaatggacaaggcaaagttggtccttcagcagatggttgataatggtgttcgaccaaatatgtatacatggaactcattcatgtactccctttgcaagaatggaagaagcaaagaagctgcagaattttttgactccatgacctccaagggccttaaacctaatatcgtcgtgtactctactcttcttcacgggtatgctagcgaa

SEQ ID NO: 2570 - DNA, 993 bp, Triticum aestivum
atggcgccaaatcattttgtctacaacatactcatatctgcatatgctcaagaagaaacggttggtgaggtaatgcatatatttacaaaaatgcggcaggaaggattgaaccctgatgttgcgaactatggagcggtaataaacttgctttctagtattggccgaatggatgatgctatgtcccaatacaatcaaatgataactgaaggattactccctggtatcattgttttcaccccccttattagtggtttctgttcttgtggcaaatgggagaaggttcctgaactattttctgagatgttggatcgcggcatctgtcccaacacagtgttcttcaacacaattatggatcgcctttgcaaaaatggaagggttatggaagcccaggatctcttcgacctgatggtacacatgggtgtgaagcctgatgtgtgtacttataacacactgataggtggatacttgttcgttggtaagatggatgaagtaaggaagttacttgacaatatggtctcaattggcttgaaaccagatgttatcacatatagcatactgattgatggttactctaagaatggaaggatagatgatgcattggttttttccagggaaatgttggccgggaaggttaagccttgtgttatcacttttaatattatgattggtgcattgcttaaatgtggcaggaaggcagaaaccaaagatttgtttgatggtatctgggccaacggattagtgcccgacgttattacatatagcttaatgatacaaaaacttattgaagaaggttctctacaagagtctgatgatctattcctttctatggagaagaatggatgtgttgccgactcccatatgctaaatgctatagttagaagcttacttcggaaaggggaggtgcccagggctgggacttatctatctaaaattgatgagagggtgttcacccttgaagcttccacttgcttcaggggggaaaggccaagaata

SEQ ID NO: 2571 - DNA, 993 bp, Triticum aestivum; identical to SEQ ID NO: 2570

SEQ ID NO: 2572 - DNA, 993 bp, Triticum aestivum; identical to SEQ ID NO: 2570

SEQ ID NO: 2573 - DNA, 1089 bp, Triticum aestivum
atgtctgaactcggctgtgtgcctgatgccttgtcgtactccgtcgttctgaaggtcttgtgtgacgatagcaggagccaacgagcgctcgacctgctccagatgatgtcgaaagaaggaggtgggtgcgccccgaacgtggtggcatatagcacgttcatccatggcttctgtaaggaaggcaaagtaagccaggcatgcgatctgttcgatgaaatggtgcagcaaggagttaagcctaatgtggtgacatacacctcagtaattgatgcgctgtgcaaggcaagagcaatggacaaggcagagtcgttccttcggcatatggtcaatcatggtgttcgacccaacaacgtgacctataagtatatgatccagggttattccactttgggctggttgaaagaggcagtaaaaatatttagagaaacgacaagtaggggtcttatactagacgatgttactcgcaacttgttcgtggcctccctttgcaaccatggaagaagcaaggaagctgctgagtttgcccatcagatgattgaaactggaacaacagtgagcatttccacatacagtataattcttggagaactttgtaggaataattgcactgaggaagcaatcatactgttccgcaaattaggtgcagtgaatgtgaagttcgatattacaatattcaataccatgattgatgcaatgtacagggttcaaagaagagaagaagctaacattttgtttgctgcaatatctgccaatggattggtacctaatgcttctacttacagaataatgataacaagtattgtaaaagaaggatcaatggaagaagctgatcatatgttttcatcaatggagacgagtggttatgctcccagctccgttctgttaaatgatatcatcagaatgttgctagaaaaaggtgagatagtcaaggctggaaattatttgtctaaagttgatgggaagtgcatttcacttgaagcttcaactggtttgttgatgatgcatctattttcaagagaaggcaaatatcatgagcaaataagatcactccctgcaaggtatgaatttttcggagtcagcacagttgag

SEQ ID NO: 2574 - DNA, 1089 bp, Triticum aestivum
atgtctgaactcggctgtgtgcctgatgccttgtcgtactccgtcgttctgaaggtcttgtgtgacgatagcaggagccaacgagcgctcgacctgctccagatgatgtcgaaagaaggaggtgggtgcgccccgaacgtggtggcatataggacgttcatccatggcttctgtaaggaaggcaaagtaagccaggcatgcgatctgttcgatgaaatggtgcagcaaggagttaagcctaatgtggtgacatacacctcagtaattgatgcgctgtgcaaggcaagagcaatggacaaggcagagtcgttccttcggcatatggtcaatcatggtgttcgacccaacaacgtgacctataagtatatgatccagggttattccactttgggctggtggaaagaggcagtaaaaatatttagagaaacgacaagtaggggtcttatactagacgatgttactcgcaacttgttcgtggcctccctttgcaaccatggaagaagcaaggaagctgctgagtttgcccatcagatgattgaaactggaacaacagtgagcatttccacatacagtataattcttggagaactttgtaggaataattgcactgaggaagcaatcatactgttccgcaaattaggtgcagtgaatgtgaagttcgatattacaatattcaataccatgattgatgcaatgtacagggttcaaagaagagaagaagctaacattttgtttgctgcaatatctgccaatggattggtacctaatgcttctacttacagaataatgataacaagtattgtaaaagaaggatcaatggaagaagctgatcatatgttttcatcaatggagacgagtggttatgctcccagctccgttctgttaaatgatatcatcagaatgttgctagaaaaaggtgagatagtcaaggctggaaattatttgtctaaagttgatgggaagtgcatttcacttgaagcttcaactggtttgttgatgatgcatctattttcaagagaaggcaaatatcatgagcaaataagatcactccctgcaaggtatgaatttttcggagtcagcacagttgag

SEQ ID NO: 2575 - DNA, 1089 bp, Triticum aestivum; identical to SEQ ID NO: 2573

SEQ ID NO: 2576 - DNA, 1089 bp, Triticum aestivum; identical to SEQ ID NO: 2573

SEQ ID NO: 2577 - DNA, 1089 bp, Triticum aestivum; identical to SEQ ID NO: 2574

SEQ ID NO: 2578 - DNA, 1089 bp, Triticum aestivum; identical to SEQ ID NO: 2573

SEQ ID NO: 2579 - DNA, 1104 bp, Triticum aestivum
atgattgatacaggagtacgaccggacacggctgtttatcgttccctaatccagggattttgtacacatggcgatttggtgaaagcaaaggaatatgttactgaaatgatgaacaaaggtatgcttcctcctgatattatgttcttcagttcaataatgcagaacctatgcacggaaggaagggtaatagaagcacgggatatcctcgacttgatggtgcacataggtatgaggcctgatgttcccatctttaatttgctgataggtggatactgcctagtctgcaagatggaggatgcaacaaaagtgtttgatgatatggtgtcatatggtttagaaccttgtaacattacggatggtatgcttattaatggctattgcaaaaatagaaggattgatgacgggcttattctgttcaaagagatgctgcacaagggacttaaacctacaacttttaattataacgtcatcttggatggattatttctggctggacgaactgttgccgcaaaggaaaagtttaatgagatggttgaatctggagtaagtatgtgcatcagtacttactctatagttcttggtggactttgtagaaatagttgcagtagcgaagcaatcacactattccagaaattaagcacgatgaatgtgaaatttgatattagaattgtcaatatcatgattggtgcattctacagggttcggcgaaaccaagaagctaaggatttgtttgccgcaataccatcaaatggcttggcagctaatgtagttacctacagcataatgataataaatcttataaaagaaggttcagtggaagaagctgacaatctttttttatctatggaaaagagtggttgtaccgctgactcttgtatgttaaatcatattatcagaaggctactggaaaaaggagagatggtcaaggctggaaattatatttctaaagttgatgcaaatagctactcacttgaagctaaaactgtttcgctgctgatctctctgttttcaaggaaagggaaatatagagaacacatcacattgctccctacaaagtatcagtttcgtgaagaagcggccacagttgagttgtttgatacatgg

SEQ ID NO: 2580 - DNA, 1104 bp, Triticum aestivum; identical to SEQ ID NO: 2579

SEQ ID NO: 2581 - DNA, 1104 bp, Triticum aestivum; identical to SEQ ID NO: 2579

SEQ ID NO: 2582 - DNA, 1104 bp, Triticum aestivum; identical to SEQ ID NO: 2579

SEQ ID NO: 2583 - DNA, 1104 bp, Triticum aestivum; identical to SEQ ID NO: 2579

SEQ ID NO: 2584 - DNA, 1104 bp, Triticum aestivum; identical to SEQ ID NO: 2579

SEQ ID NO: 2585 - DNA, 1188 bp, Triticum aestivum
atgcgggaaaaaggagtgagtcctgatgtagtcacctataccactgtaatagccgcactttccagaatgggtaggttgaccgatgctgtggacaaatttgatgagatgattgcaatgggagtacagccaagcatacctgtttatcagtccctgattcagggtttttgcatcgatggtgatttggttaaagccaaggagctggtttctgaaatgatgaacaaaggtattccttgtcctaacattgtgttcttcaattcagtaataaacagtctgtgcaaagaaggaagggttatggatgcacatgatatctttgacttggttatagacataggtgagaggcctgataccattacatttagttcactgattgacggatattgcttagtcggcaagatggataaagcattcggaatgcttaatgccatggaatcagttggtgttgagcctgatattgttacttacagtacactgcttgatggctattttaaaaatggaaggatagacgatggtttgactctgttcagagaaatgccgcgaaagagaattaaacctgacactgttacatatggcatcatactggatgggttgtttcgttctgggagaactgttgctgcatggaaaatgttccatgagatgatcgaaagtggaacaacagtgaccttttccatatacgctataatacttggaggtttttgtagaaataattgcgcagacgaagctatcaccctgttccacaaattaggtgcaatgaatgtgaagttcaatattgcaatagtcaataccatgatcaatgcaatgtacaaggttgggagaagagaagaagctaaggaactatttgctggaatattagcccgtgggttggtgcctaatgaatctacttacggagtaatgataaaaaatcttctaaaagatggagtagtggaagatgctaacaatgtgttttcatcaatggacaagagtggtatagtccccagctcccgtctcatcaatgacatcatcagattgttgttggaaaaaggtgagatcgccaaggccggatattatttgtctaaagttgatgggaagagcatatcacttgaagcttcaactacttcattgatgttttctctcttctcaatgaaaggcaaatataaggagcacatgaaattgctccctgccaagtatcaatttttcgatgagttggttgac

SEQ ID NO: 2586 - DNA, 831 bp, Triticum aestivum
atgataaaatgcaacacggaagcaaatgacaagacaacaacaacgaataactggaagacacctggcgcaacggtctcggggcgttacactgatattgttacttacagtacactgcttgatggctattttaaaaatggaaggatagatgatggtttgactctgttcagagaaatgccgcgaaagagaattaaacctgacactgttacatatggcatcatactggatgggttgtttcgttctgtgagaattgttgctgcatggaaaatgttccatgagatgatcgaaagtggaacaacagtgaccttttccatatacgctataatacttggaggtttttgtagaaataattgcgcagacgaagctatcaccctgttccacaaattaggtgcaatgaatgtgaagttcaatattgcaatagtcaataccatgatcaatgcaatgtacaaggttgggagaagagaagaagctaaggaactatttgctggaatattagcccgtgggttggtgcctaatgaatctacttacggtgtaatgataaaaaatcttctaaaagatggagcagtggaagatgctaacaatgtgttttcatcaatggacaagagtggtatagtccccagctcccgtctcatcaatgacatcatcagattgttgttggaaaaaggtgagatcgccaaggccggatattatttgtctaaagttgatgggaagagcatatcacttgaagcttcaactacttcattgatgttttctctcttctcaaggaaaggcaaatataaggagcacatgaaattgctccctgccaagtatcaattttttgatgagttggttgac

SEQ ID NO: 2587 - DNA, 1188 bp, Triticum aestivum; identical to SEQ ID NO: 2585

SEQ ID NO: 2588 - DNA, 1188 bp, Triticum aestivum; identical to SEQ ID NO: 2585

SEQ ID NO: 2589 - DNA, 1188 bp, Triticum aestivum; identical to SEQ ID NO: 2585

SEQ ID NO: 2590 - DNA, 1188 bp, Triticum aestivum; identical to SEQ ID NO: 2585

SEQ ID NO: 2591 - DNA, 1188 bp, Triticum aestivum; identical to SEQ ID NO: 2585

SEQ ID NO: 2592 - DNA, 1188 bp, Triticum aestivum
atggatcctacggcccgtatagaaggccaatattcaaccgtaatacatacattttgcaaaaagggtaggttggatgatgctgtgataaagtttaatcagatgattgatacaggagtacgaccggacacggctgtttatagttccctaatccagggattttatacacatggagatttggtgaaagcaaaggaatatgttactgaaatgatgaagaaaggtatgcttcctcctgatattaagttcttccattcaatcatgcagaacctttgcacagaaggaagggtaatagaagcacgggatgtccttggcttgatagcgcacataggtatgaggcctgatgtttgcacatttaatatactgatcggtggatactgcctagtcggcaagatggaggatgcctcaaaaatatttgatgatatgatgtcatatggcttagaaccttctaatattacgtatggtatacttattaatggctattgcaaaaatagaaggattgatgacgggcttattctgttcaaagagatgctgcacaagggacttaaacctacaacttttaattataacgtcatactggatggattatttctggctggacgaactgttgctgcaaaggaaaagtttgatgagatggttgaatctggagtaagtgtgtgcattggtacatattcgacagttcttggtggactttgtagaaataattgtagcggcgaagcaatcacgctattccagaaattaagcacaatggatgtgaaattcaatattataattgtcaatataatgattgatgctttctacaaggttcagcgaaaccaagaagccaaggatttgtttgctgcagtatcagccaatggtttggtagctaatgtctttacctacaccataatgatgaaaaatcttataaaagaagggtcagtgggagaagctgacgatctctttttatcaatggagaagagctgctgtactgctgactcttatatgttaaatcttatcgtcagaatgttactgggaaaaggagagatagtcaaggctgggaattatatatctaaaattgatgcaaagagctactcacttgaagctaaaactgtttcgctgcttatctctctcttttcagggaaagggaaatatagagaacacataggattgctccatacaaagtatccgtttcgtgaagaagcagccacggttgtg

SEQ ID NO: 2593 - DNA, 1188 bp, Triticum aestivum
atggatcctacggcccgtatagaaggccaatattcaaccgtaatacatacattttgcaaaaagggtaggttggatgatgctgtgataaagtttaatcagatgattgatacaggagtacgaccggacacggctgtttatagttccctaatccagggattttatacacatggagatttggtgaaagcaaaggaatatgttactgaaatgatgaagaaaggtatgcttcctcctgatattaagttcttccattcaatcatgcagaacctttgcacagaaggaagggtaatagaagcacgggatgtccttggcttgatagcgcacataggtatgaggcctgatgtttgcacatttaatatactgatcggtggatactgcctagtcggcaagatggaggatgcctcaaaaatatttgatgatatgatgtcatatggcttagaaccttctaatattacgtatggtatacttattaatggctattgcaaaaatagaaggattgatgacgggcttattctgttcaaagagatgctgcacaagggacttaaacctacaacttttaattataacgtcatactggatggattatttctggctggacgaactgttgctgcaaaggaaaagtttgatgagatggttgaatctggagtaagtgtgtgcattggtacatattcgacagttcttggtggactttgtagaaataattgtagcggcgaagcaatcacgctattccagaaattaagcacaatggatgtgaaattcaatattataattgtcaatataatgattgatgctttctacaaggttcagcgaaaccaagaagccaaggatttgtttgctgcagtatcagccaatggtttggtagctaatgtctttacctacaccataatgatgaaaaatcttataaaagaagggtcagtggaagaagctgacgatctctttttatcaatggagaagagcggctgtactgctgactcttatatgttaaatcttatcgtcagaatgttactgggaaaaggagagatagtcaaggctgggaattatatatctaaaattgatgcaaagagctactcacttgaagctaaaactgtttcgctgcttatctctctcttttcagggaaagggaaatatagagaacacataggattgctccctgcaaagtatcggtttcgtgaagaagcagccacagttgtg

SEQ ID NO: 2594 - DNA, 1185 bp, Triticum aestivum
atggtaagtctgggccaaaaaccgaccgttactacctacagcattttgctccatgggtatgctatggagcaatcttttcatgagatgcattgtctcattgatttgatggtgggaaatggtattgcgccaaatcattttgtctacaacatactcatatctgcatatgctcaagaagaaacggttggtgaggtaatgcatatatttacaaaaatgcggcaggaaggattgaaccctgatgttgcgaactatggagcggtaataaacttgctttctagtattggccgaatggatgatgctatgtcccaatacaatcaaatgataactgaaggattactccctggtatcatagttttcaccccccttattagtggtttttgttcttgtggcaaatgggagaaggttgatgaactattttctgagatgttggatcgcggcatctgtcccgacacagtgttcttcaacactgttatggatcacctttgcaaaaatggaagggttatagaagcccaggatctcttcgacctgatggtacacatgggtgtgaagccttttgtccgtgattacaacacactgatacatggatactgtttagttggtaagatggatgaagggaggaagttacttgacaatatgtgctcaattggcttgaaaccggatgatttcacctatagcatactgattgatggttactctatgaagggaaggataggtgatgcattgattgttgtcagggaaatgttggacaggaaggttaaaccttctattatcacttttaatattatgattggtgcgttgcttaaaggtggcagaaaggaagaagccaaagatttgtttgatggtatctgggccaaaggattagtgcctgacgttgttacatatagattaatgatacaaaagcttatagaagaaggttctctacaagattctgatgatctattcctttctatggagaagaatggatgtgttgccgactcccgtatgctaaatgctatagttagaagcttacttcagaaaggggacgtgccgagggctgggacttatctgtctaaaattgatgagaggaggttcacctttgaagcttccactgctagcttattgacttcacttgcgtcaggggggaaaggccaggaatataaggagttactccctgaagaataccactcttttctggaacagggcactggt

SEQ ID NO: 2595 - DNA, 1185 bp, Triticum aestivum; identical to SEQ ID NO: 2594

SEQ ID NO: 2596 - DNA, 1185 bp, Triticum aestivum; identical to SEQ ID NO: 2594

SEQ ID NO: 2597 - DNA, 1122 bp, Triticum aestivum
atggaacaatcttttcatgagatgcattgtctcattgatttgatggtgggaaatggtattgcgccaaatcattttgtctacaacatactcatatctgcatatgctcaagaagaaacggttggtgaggtaatgcatatatttacaaaaatgcagcaggaaggattgaaccctgatgttgcgaactatggagcggtaataaacttgctttctagtattggccgaatggatgatgctatgtcccaatacaatcaaatgataactgaaggattactccctggtatcatagttttcaccccccttattagtggtttctgttcttgtggcaaatgggagaaggttgatgaactattttctgagatgttggatcgcggcatctgtcccgacacagtgttcttcaacactgttatggatcacctttgcaaaaatggaagggttatagaagcccaggatctcttcgacctgatggtaaacatgggtgtgaagccttttgtccgtgattacaacacactgatacatggatactgtttagttggtaagatggatgaagggaggaagttacttgacaatatgtgctcaattggcttgaaaccggatgatttcacctatagcatactgattgatggttactctatgaagggaaggataggtgatgcattgattgttgtcagggaaatgttggacgggaaggttaaaccttctattatcacttttaatattatgattggtgcgttgcttaaaggtggcagaaaggaagaagccaaagatttgtttgatggtatctgggccaaaggattagtgcctgacgttgttacatatagattaatgatacaaaagcttatagaagaaggttctctacaagagtctgatgatctattcctttctatggagaagaatggatgtgttgccgactcccgtatgctaaatgctatagttagaagcttacttcagaaaggggacgtgccgagggctgggacttatctgtctaaaattgatgagaggaggttcacctttgaagcttccactgctagcttattgactgcacttgcgtcaggggggaaaggccaggaatataaggagttactccctgaagaataccactcttttctggaacagggcactggt

SEQ ID NO: 2598 - DNA, 1122 bp, Triticum aestivum
atgtctcgcctccgcctcctccgccgcagctcctcctccaccacactgataccccgcctccggctcctccgccgctgctccacctccacctccacctcaccgccctcaggcccctggtctccccgagacgcttttgtcgccgccatagagcgtgttcgcgccgggacgctcagcccggaagacgctcaccacctgttcgacgatttgctcggtcaagccaccccggtccccgatcgcaccatgaacggcgtcctcgcccgtgccacgtcccccgccgcctgcatcagagatggccccgcccttgccgtcgctctcttcaaccgtgtgtgccgagaagaggccggtccgcatgtggcggcgcccacagtccacacctatggcatcctcatggactgctgctgccgcgcacgtcgcccggacctagggcttgccttattcggccgcttcctcaggacaggcctgaaggcaaacgagatcgtcgccaccaccttcctcaagtgcctctgctgcgcgaaacggacagaagaggctgtgaaagtactgcttcacaggatgcccgagctgggctgtgtgcctaatgccatctcgtactccatagttttgaaaagcttgtgtgaaaatagcatgagtcagcaggcactcgacctgctccagatggcgacaaaagaaggaggctgccttcctgatgtggtggcatatagcgcaatcatccatggcttctttaaggagggcgaaatagacaaggcatgccatctattccatgaaatgatgcggcaaggggttgtgccgactgtggtgacatacaacataataattgatgcgttgtgcaaggccggagaaatggacaaggcagagctagtctttcagcggatggctcgtaatggtgcgcggcctaataaagcgacatgtaatggcagtaaatttagttcactgactgacggatattgctcagtcgccaagatggataaaacattcaaactgcttgatgccatgatatcagttggaattgagcctgatgctgttacttatagtgcacttcttgatggctattttaaaaatggaaggatcgatgatggtttgaccctatttagagaaatgtcgtgcgagttaaacctacaactg

SEQ ID NO: 2599 - DNA, 1122 bp, Triticum aestivum; identical to SEQ ID NO: 2598

SEQ ID NO: 2600 - DNA, 1122 bp, Triticum aestivum
atgtctcgcctccgcctcctccgccgcagctcctcttccaccacactgataccccgcctccggctcctccgccgctactccacctccacctccacctcaccgccctcaggcccctggtctccccgagacgcttttgtcgccgccatagagcgtgttcgcgccgggacgctcagcccggaagacgctcaccacctgttcgacgatttgctcggtcaagccaccccggtccccgatcgcaccatgaacggcgtcctcgcccgtgccacgtcccccgccgcctgcatcagagatggccccgcccttgccgtcgctctcttcaaccgtgtgtgccgagaagaggccggtccgcatgtggcggcgcccacagtccacacctatggcatcctcatggactgctgctgccgcgcacgtcgcccggacctagggcttgccttattcggccgcttcctcaggacaggcctgaaggcaaacgagatcgtcgccaccaccttcctcaagtgcctctgctgcgcgaaacggacagaagaggctgtgaaagtactgcttcacaggatgcccgagctgggctgtgtgcctaatgccatctcgtactccatagttttgaaaagcttgtgtgaaaatagcatgagtcagcaggcactcgacctgctccagatggcgacaaaagaaggaggctgccttcctgatgtggtggcatatagcgcaatcatccatggcttctttaaggagggcgaaatagacaaggcatgccatctattccatgaaatgatgcggcaaggggttgtgccgactgtggtgacatacaacataataattgatgcgttgtgcaaggccggagaaatggacaaggcagagctagtctttcagcggatggctcgtaatggtgcgcagcctaataaagcgacatgtaatggcagtaaatttagttcactgactgacggatattgctcagtcgccaagatggataaaacattcaaactgcttgatgccatgatatcagttggaattgagcctgatgctgttacttatagtgcacttcttgatggctattttaaaaatggaaggatcgatgatggtttgaccctatttagagaaatgtcgtgtgagttaaacctacaactg

SEQ ID NO: 2601 - DNA, 1122 bp, Triticum aestivum; identical to SEQ ID NO: 2598

SEQ ID NO: 2602 - DNA, 1122 bp, Triticum aestivum; identical to SEQ ID NO: 2598

SEQ ID NO: 2603 - DNA, 1122 bp, Triticum aestivum; identical to SEQ ID NO: 2598

SEQ ID NO: 2604 - DNA, 1122 bp, Triticum aestivum; identical to SEQ ID NO: 2598

SEQ ID NO: 2605 - DNA, 1053 bp, Triticum aestivum
atgaagctcaaaatgcctgggcccggcggaataatcactctcgttagtaatccgtacatagcactccgcgctgaaaacaagacagccgcattagccttagaggcactatccgaagccctagcggcagaggaactcaccgcgctgcgctctacggtgaatagggacgatgtgatactcgataagagatccaagtccacctcctttaaaccagcggatgaaatagtcaaattccaagtccacccaacggaccctaccaaaacaacctccatcagggcacagttaaaccccgttgtggacgccgcactacgagagttcctgcgcgagaattgggacatattcgcctggcatccttcagacatgccaggaatcccacgcaggctggccgagcatagcctcaatatcctaaagggagttataaacaacctgagcaaagaaggaaatgtaaaggatgcacaagatatgtttgacttcattgtaggtattggtcatcagcctgatgttattatgtacaattcactgatggatggatattgccttgttggcaaggtggaggaagcaatgacagtgcttgatgctatgaagtccgctggcctccaacctgatgctattacgtatgctatacttcttaatggctactgtaaaattggaaggatcgacgatggattgagtctttttagggaaatctcactcagcagggttaagcccacgactattatgtacaacattatacttgatgggctgttttgctgtgggagaacagtttttgcaaaggaagaattcgatacaatgattgaaagtggcataccggtgggcattgacacatgcaccatagttcttagtggactttgcaaaaataattgcactgatgaagcaatagagctgttcaagaagttatgtgcaatgaatgtgaagtttgatgtcataattctcactaccatgatttctgcaatgtttaagactaggagaattgaagaagccaaggatttgtttgctactatatcaaccatagggttggtgccttctgttgtgacttacagtgtaattttttttttt

SEQ ID NO: 2606 - DNA, 942 bp, Triticum aestivum
atggactgctgctgccgggcgcgtcgcccggatctagggcctgctttccttgggcgcctcctcaggacgggcctgaagacaaaccagatcgtcgccaacaccctcctcaagtgcctctgctacgccaaacggacggatgaggctgtcaatgtattgcttcacaagatgtccgagctcggctgcgtgcctgatgccatctcatacaacacagttcttaagagcttatgtgaagatagcagaagccaggaagcactcgacctgctctggatggtggcaaaagaaggaggtgtcggctctctcgatgtggtatcccatagcactgtcatccatggcttctttaaggaaggcgaaacaggcaaggcatgcaatctattccatgaaatgacacatcaagggattgtgcccaatgtgatgacatataacttgattattgctgcgttgtgcaaggccagagcaatggacaaggcagagctgatccttcggcagatggttgataacggtgttcgacccaatacagttacttgcagctcgctcatgtcttccctttgcaagcatggaagaagcaaagaagctgcagaaatttttgactccatgactgccaagggcctcaaacctgatatcgtcgcatactctattctgcttcatggatatgccactgaaggatgccttgctgatatgattgatctcttcaattcaatgaaaaacaatggtattgaagccacttgtcaagttttcaacatattaattggtgcatatgctaaatgtggaatgatggatgaggctatgctcatatttactgaaatgcggcgacaaggagtgagtccggatgtattcacctatacaactgtaatagtctcactttttcgaacgagtagactggccgatgctattgacaaattcgatgagatgattgccattggagtacagccaaacagacctgtt

SEQ ID NO: 2607 - DNA, 942 bp, Triticum aestivum; identical to SEQ ID NO: 2606

SEQ ID NO: 2608 - DNA, 942 bp, Triticum aestivum
atggactgctgctgccgggcgcgtcgcccggatctagggcctgctttccttgggcgcctcctcaggacgggcctgaagacaaaccagatcgtcgccaacaccctcctcaagtgcctctgctacgccaaacggacggatgaggctgtcaatgtattgcttcacaagatgtccgagctcggctgcgtgcctgatgccatctcatacaacacagttcttaagagcttatgtgaagatagcagaagccaggaagcactcgacctgctctggacggtggcaaaagaaggaggtgtcggctctctcgatgtggtatcccatagcactgtcatccatggcttctttaaggaaggcgaaacaggcaaggcatgcaatctattccatgaaatgacacatcaagggattgtgcccaatgtgatgacatataacttgattattgctgcgttgtgcaaggccagagcaatggacaaggcagagctgatccttcggcagatggttgataacggtgttcgacccgatacagttacttgcagctcgctcatgtcttccctttgcaagcatggaagaagcaaagaagctgcagaaatttttgactccatgactgccaagggcctcaaacctgatatcgtcgcatactctattctgcttcatggatatgccactgaaggatgccttgctgatatgattgatctcttcaattcaatgaaaaacaacggtattgaagccacttgtcaagttttcaacatattaattggtgcatatgctaaatgtggaatgatggatgaggctatgctcatatttactgaaatgcggcgacaaggagtgagtccggatgtattcacctatacaactgtaatagtctcactttgtcgaacgagtagactggccgatgctattgacaaattcgatgagatgattgccattggagtacagccaaacagacctgtt

SEQ ID NO: 2609 - DNA, 942 bp, Triticum aestivum; identical to SEQ ID NO: 2606

SEQ ID NO: 2610 - DNA, 942 bp, Triticum aestivum; identical to SEQ ID NO: 2606

SEQ ID NO: 2611 - DNA, 777 bp, Triticum aestivum
atgtccgagctcggctgcgtgcctgatgccatctcatacaacacagttcttaagagcttatgtgaagatagcagaagccaggaagcactcgacctgctctggacggtggcaaaagaaggaggtgtcggctctctcgatgtggtatcccatagcactgtcatccatggcttctttaaggaaggcgaaacaggcaaggcatgcaatctattccatgaaatgacacatcaagggattgtgcccaatgtgatgacatataacttgattattgctgcgttgtgcaaggccagagcaatggacaaggcagagctgatccttcggcagatggttgataacggtgttcgacccgatacagttacttgcagctcgctcatgtcttccctttgcaagcatggaagaagcaaagaagctgcagaaatttttgactccatgactgccaagggcctcaaacctgatatcgtcgcatactctattctgcttcatggatatgccactgaaggatgccttgctgatatgattgatctcttcaattcaatgaaaaacgacggtattgaagccacttgtcaagttttcaacatattaattggtgcatatgctaaatgtggaatgatggatgaggctatgctcatatttactgaaatgcggcgacaaggagtgagtccggatgtattcacctatacaactgtaatagtctcactttttcgaacgagtagactggccgatgctattgacaaattcgatgagatgattgccattggagtacagccaaacagacctgtt

SEQ ID NO: 2612 - DNA, 942 bp, Triticum aestivum; identical to SEQ ID NO: 2606

SEQ ID NO: 2613 - DNA, 1098 bp, Triticum aestivum
atgtgcaaggcaggagcaatggacaagacagagctggtccttcggccaatggtcgataatggtgtccgaccggataaaatgatatgtaatagtatgatccatggatattcaactttgggccggtggaaagaggcgggtaaagtgttcagagaaatgacaagccggggtcttataccagatattttcacttggaactcgttcatgggctccctttgcaagcatggaagaagcaaagaagctgcagaaattttcttttccatggctgcaaagggccacaaacctaatattgtctcctacattcttcttcttcgtgtgtatgccaatgaaggaagatttgctgatatgatgagtctccttaatttaatggaaggcgacggtattgtagccaactgccaaattttcaccatattaattgatgcatatgctaaacaaggaatgattgatgaagctatgcttgtacttactgacatgcggggacaaggactgagtccggatgtattcacctattcagctctattatctgcactttgtagaatgggtaggctggctgatgctatggataagttcactcagatgattggcacgggagtacaaccgaacacagttgtttatcactccctagttcagggcttatgtacacatggtgatttggcgaaagcgaaggagttagtttctaaaatgatgaataaaggtattgctcgtccaaacattgcattgttcagttcaataatggccagtctatgcaatgaaggaagggttatggatgcacaccatatctttgacttggttacagacataggtgagaaacctaatatcattatgtttactacgctgattgatggatattgcttagtcggcaagatggacaaagcatgtggagtacttgatgccatggtatcagctggcattgagcctaatgtcgttacatatagtacacttgtcagtggatattgtaaaaatggacggatcgataatgggttgattctgttcagagacatgttgagaactgctgctgcaaagaaaatgttccgtgagattatcgaaagtagaataattgtgagcatttctacatataatataattcttgggatgactttg

SEQ ID NO: 2614 - DNA, 1098 bp, Triticum aestivum
atgtgcaaggcaggagcaatggacaagacagagctggtccttcggccaatggtcgataatggtgtccgaccggataaaatgatatgtaatagtatgatccatggatattcaactttgggccggtggaaagaggcgggtaaagtgttcagagaaatgacaagccggggtcttataccagatattttcacttggaactcgttcatgggctccctttgcaagcatggaagaagcaaagaagctgcagaaattttcttttccatggctgcaaagggccacaaacctaatattgtctcctacattcttcttcttcgtgtgtatgccaatgaaggaagatttgctgatatgatgagtctccttaatttaatggaaggcgacggtattgtagccaactgccaaattttcaccatattaattgatgcatatgctaaacaaggaatgattgatgaagctatgctcgtacttactgacatgcggggacaaggactgagtccggatgtattcacctattcagctctattatctgcactttgtagaatgggtaggctggctgatgctatggataagttcactcagatgattggcacgggagtacaaccgaacacagttgtttatcactccctagttcagggcttatgtacacatggtgatttggcgaaagcgaaggagttagtttctaaaatgatgaataaaggtattgctcgtccaaacattgcattgttcagttcaataatggccagtctatgcaatgaaggaagggttatggatgcacaccatatctttgacttggttacagacataggtgagaaacctaatatcattatgtttactacgctgattgatggatattgcttagtcggcaagatggacaaagcatgtggagtacttgatgccatggtatcagctggcattgagcctaatgtcgttacatatagtacacttgtcagtggatattgtaaaaatggacggatcgataatgggttgattctgttcagagacatgttgagaactgctgctgcaaagaaaatgttccgtgagattatcgaaagtagaataattgtgagcatttctacatataatataattcttgggatgactttg

SEQ ID NO: 2615 - DNA, 1098 bp, Triticum aestivum; identical to SEQ ID NO: 2614

SEQ ID NO: 2616 - DNA, 1098 bp, Triticum aestivum; identical to SEQ ID NO: 2614

SEQ ID NO: 2617 - DNA, 1098 bp, Triticum aestivum
atgtgcaaggcaggagcaatggacaagacagagctggtccttcggccaatggtcgataatggtgtccgaccggataaaatgatatgtaatagtatgatccatggatattcaactttgggccggtggaaagaggcgggtaaagtgttcagagaaatgacaagccggggtcttataccagatattttcacttggaactcgttcatgggctccctttgcaagcatggaagaagcaaagaagctgcagaaattttcttttccatggctgcaaagggccacaaacctaatattgtctcctacattcttcttcttcgtgtgtatgccaatgaaggaagatttgctgatatgatgagtctccttaatttaatggaaggcgacggtattgtagccaactgccaaattttcaccatattaattgatgcatatgctaaacaaggaatggttgatgaagctatgctcgtacttactgacatgcggggacaaggactgagtccggatgtattcacctattcagctctattatctgcactttgtagaatgggtaggctggctgatgctatggataagttcactcagatgattggcacgggagtacaaccgaacacagttgtttatcactccctagttcagggcttatgtacacatggtgatttggcgaaagcgaaggagttagtttctaaaatgatgaataaaggtattgctcgtccaaacattgcattgttcagttcaataatggccagtctatgcaatgaaggaagggttatggatgcacaccatatctttgacttggttacagacataggtgagaaacctaatatcattatgtttactacgctgattgatggatattgcttagtcggcaagatggacaaagcatgtggagtacttgatgccatggtatcagctggcattgagcctaatgtcgttacatatagtacacttgtcagtggatattgtaaaaatggacggatcgataatgggttgattctgttcagagacatgttgagaactgctgctgcaaagaaaatgttccgtgagattatcgaaagtagaataattgtgagcatttctacatataatataattcttgggatgactttg

SEQ ID NO: 2618 - DNA, 1098 bp, Triticum aestivum; identical to SEQ ID NO: 2614

SEQ ID NO: 2619 - DNA, 1125 bp, Triticum aestivum
atgccccgcctccgtcgcttctccaccgtgccgatgctccacctcctccgccgcagctcctcttccacctccacctcgctgccctcacacccctggtctccccacgaagcctttgccgcggccacagagcgcgtccgcgccgggacgctaaccccggaagaagcacacaacctgttcgacggcttccccggtccccagccgctccctgaacggcttccttgccgccctcgcccgtgcgccggcctccgcaacctgccgcagagatggccctgccctcgcccttgccctcttcaaccgcgtatgccgagaagaagccggcccgcaggtggcatcctcatgggctgcttctgcggtgcgcatcgcccggacctagggcttgccttatttggccgcttcctcgggacaggcctcaagacaaacaagattgtggccaccaccttcctcaagtgcctctgctacgccaaacgtacagatgaggctgtcaacttgctgcttcgtaggatgcccgagcttggctgcgtgcctgatgcaatctcatacaccattgttctgaagagcttatgcgagaatagcatgagtcagcgggcacttgacctgctccagatggtggcagaaggaggaggtgcctgctccctcaatgtggtggtgtatagcacagtcatccatggcttcttcaaggagggcgaaacaggcaaggcatgcaatctattccatgaaatgatccatcaaggggttgtgcccaatgtggtcacgtatagctcgattattgatgcgttgtgcaaggccagagcaatggacaaggcagagctagtccttcaacagatggttgatagtggtgctcaaccgaataatgtgacatataattgcatgatccatggatattccacatcagggcagttgaaagaggctgctaaaatgtttagaaaaatgacaagccatggtcttgtaccaaatgcagtcacttgcagctcgttaatgacttccctttgcaagcatggaagaagcaaagaagcggcggaaatattttattccatgactgccaagggccacaaaccggatgccgtctcgtaccgtattttgcttcatgggtatgccaatgaaggatgctttgctgatatgattgat

SEQ ID NO: 2620 - DNA, 1167 bp, Triticum aestivum
atgtttgatgtatacaagaagtgtgcaaaacgaagggaagagcttttgctcggccgaccgcttgtacacacatccgttggcttggaaatgacctcctcgccgatgtgccgcatcggcctccgccaccgccgctcctcctcctccacctcactgatgtcccgcctccgcctactcgggcgcagctcctcctccacctccacctccccgcgctcacgcccctggtctccccacgccgcctttgccgctgccacacagcgggtcagcgctgggacgttcagcccggaacacgcacaccaactgttcgacgaattgctccggcagggcactccggtccccgatttctccctggacggcttccttgccgctctcgcccgtgctacgtcctccgcggcctgcagagatggccccgccctcgcgctcgccctcttcaaccgcttatgccgagaagaagctggcccgcgggtggcgcagcccacaatcttcacctacggcgtcctcatgaactgctgcgtccgcactcgccgcccgcaactggggcttgccttcttcggccgtgtcctcaggacggacctgaagacaaacacgatcgtcttcagctccctcctcaagtgcctctgccacgccaaacggacagacgaggatgtcagcgtgctgcttcataggatgcccgagctcggttgtgtgcctgatgccttctcatacaccattgttcttaagagcttatgtgatgatagcagcagccagcgggcgctcgacctgctccagactatggagaaaggaggaggtgtctgctcccctgatgtggtgtcatataccacggtcatccacggcctccttaaggaaggggaagtaagcaaggcatgcagtctattcgatgaaatggtgcagcaaggggttgtgcctaatgtggtgacatacagctcgattattgatgcgctgtgcaaggctggagtgatggacaagacggagttggtccttcggcagatggttgatagtggcatccaaccggataacgtgacatatactagcatgatccatggatattccacgttgggccggtggaaagaagctgacaagccggggtatcataccagatgttgttacttggacctcattcatgacctccctctgcaagcatggaagaagcagagaagctgccggaattat

SEQ ID NO: 2621 - DNA, 1032 bp, Triticum aestivum
atgaagcgcacagaggaggctctgaacgtgctgctccataagatgcccaacgacctgcctaatgtcatctcctactcagtgattctcaagagcttctgcgacaatgggaggagccagcttgcgcttgatctgctccagatgatggccaaaaaaggcgctgaccactcccccgacgtgatgtcatacaacatggtaattgatggcttctttaaggagggtgaagtaagcaaagcatgcgatctattccaagaaatgatacgacaggggattgtgcctactgaggtgacatatagctccattatcaatgcgctatgcaaagcaagagcaatggacaaggcagaggtggttcttcgatcaatggttcataatggtgcccaaccagatgctgtgacatataatagcttgatccaaggatattcaactttgggacagttgaaagaagtcgctaggttgttgaaagtgatgagaagtcaaggtgttatgccaagcgttgttacctacaacttactcatgacctgcctttgcaagcatggaaaaaccaaagaagctgagaaaatattttattctatggccgtgaacggacgaaaacctgatgtcatctcatactctattttgctccatgggtacgctaaagaaggatccctcattgatatgattgatctctgtgagcggatggcaagagatggagttgtacccaacctccattgtttcaacatactgattaatgcatatgctaagcatggaatgatgggtgtggccctgcttttcttcgaagatatgttgaagcagggggtgaagcctagtgaattcacttatttaactgtgatatctgcattttgcaagatgggcaggatggatgatgcgatggaaaaattccgtgagatgattgatatgggagtaccagttgacacagaagtttacatgtgcatagttgagggttattttaaaaatggtgattcagtgaaagccaaggattttattaccaaaatgaagaacaaggatattccaaataggccgcagaagggtaattat

SEQ ID NO: 2622 - DNA, 1032 bp, Triticum aestivum; identical to SEQ ID NO: 2621

SEQ ID NO: 2623 - DNA, 1032 bp, Triticum aestivum; identical to SEQ ID NO: 2621

SEQ ID NO: 2624 - DNA, 1032 bp, Triticum aestivum; identical to SEQ ID NO: 2621

SEQ ID NO: 2625 - DNA, 1032 bp, Triticum aestivum; identical to SEQ ID NO: 2621

SEQ ID NO: 2626 - DNA, 801 bp, Triticum aestivum
atgaagcgcacagaggaggctctgaacgtgctgctccataagatgcccaacgacctgcctaatgtcatctcctactcagtgattctcaagagcttctacgacaatgggaggagccagcttgcgcttgatctgctccagatgatggccaaaaaaggcgctgaccactcccccgacgtgatgtcatacaacatggtaattgatggcttctttaaggagggtgaagtaagcaaagcatgcgatctattccaagaaatgatacgacaggggattgtgcctactgaggtgacatatagctccattatcaatgcgctatgcaaagcaagagcaatggacaaggcagaggtggttcttcgatcaatggttcataatggtgcccaaccagatgctgtgacatataatagcttgatccaaggatattcaactttgggacagttgaaagaagtcgctaggttgttgaaagtgatgagaagtcaaggtgttatgccaagcgttgttacctacaactcactcatgacctgcctttgcaagcatggaaaaaccaaagaagctgagaaaatattttattctatggccgtgaacggacgaaaacctgatgtcatctcatactctattttgctccatgggtacgctaaagaaggatccctcattgatatgattgatctctatgagcggatggcaagagatggagttgtacccaacctccattgtttcaacatactgattaatgcatatgctaagcatggaatgatggatgtggccctgcttttcttcgaagatatgttgaagcagggggatgaagcc

SEQ ID NO: 2627 - DNA, 753 bp, Triticum aestivum
atgtcaaccgcccgcctgtgctccaccttcacctcctccttgaaggctccttcacgaaaaccacgagccccccgcctcgccgccttggctgccgccacggagcgtgtccgcgctggaacgctaactcggcaggacgcgcacaagctgttcgacaaattgctgagccaagccgcgacagtcccagtacgcaagctgaacaactttcttgccgccctcgcccgtgcaccgccctcagctgcctgcagcgatggtccgggccttgccatcgccctcttcaaccgcatgtcccgaggcgctggtgcacgggtggcgtcgcccacgctctgtacctattccatcctcatggactgctgctgccgcgcaggccgcccggacttggtgcttgccttcttcagccgcctcctcaggttggggctgagcttgaatgtcatctccttcagcaatctcctcaaggggctttgccaggccaagcgctcaaatgaggctttggacatgctgctccaccggacacctgaactacactgtgcgcctgatgtcttctcgtacaacatagtaatcaacggctgcttgaaagaaggtgaagtagacaaagcgtgcaatctcttccatgagatgccccaactgggagttcaacctgatgtggtgacctacacctcaatcatggacgcactaagcaagtccggagcaatggacaaggcagaagtgctccttcggcaaatggttgatcaaggaattgaacccaatatcaagaca

SEQ ID NO: 2628 - DNA, 915 bp, Triticum aestivum
atggggcacgtcattaagttgggatttacagcagaagctattgtcaatttcaaccacctactcaaggccatctgtgcggagaagaagaccagctatgcaatggacatcgtactccgagtaatgcctgaatttaactgcacaccgaacattttctcctactacattcttttcaagggtctctgcaacgagaagagaagccaagaggctctcgagctgattcaaattatggttgaggatggaggttgctgccgacctgatgtggtgacctatagcactgtaattgatggcttgttgaaagagggtgaggtggaccaagcttacagcctattttctgaaatgctgcgtcagggggtatcaccgaatattgtgacctgtaattcaatcatctctggcatgtgcaagcttcacgcgatggacaaggctgaggaggttcttcaacagatgtttgatagaagaattctgccagatgttgccacatatactagtctaatacatggatattattcattaggacagtgcaaagaggtggatcggattctcaatgaaatgtgtaaacatggtgttcaaccagatattgtaacttacaatatacagatggattatctttgcaagagcggaaggtgcgcagaagctaggaatctattagattctttgatcggtttgggccaaaaaccagatgttactacctacagtattctgcttcatgggtatgccatggaaaaatcttttgatgagatgcattgtctcattgatttgatggtaggaaatggtgttgcaccagatcatcatatctacaacatactcatatctgcatatgctaaagaagaaacggttggtgaggtaatggatatatttacaaaaatgcggcagcaaggattgaaccctgatgttgagagaattgcatgtagtggggat

SEQ ID NO: 2629 - DNA, 915 bp, Triticum aestivum; identical to SEQ ID NO: 2628

SEQ ID NO: 2630 - DNA, 915 bp, Triticum aestivum; identical to SEQ ID NO: 2628

SEQ ID NO: 2631 - DNA, 987 bp, Triticum aestivum
atgtttgaaatgatgaacggtggtattcttcggcctaacattgtgttcttcaattcagtaataaacagtctgtacaaagaaggaagggttatggatgcacatgatgtcttagacttggttataggcataggtgagaggcctgataccattacatttagttcactgattgacggatattgcttagtcgggaagacggataaagcattcaaaatacttgatgccatggaatcagttggtgttgagcctgatattgttacttacaatacactgcttgatggctattttaaaaacagaaggattgatgatgctttgactttgtttagagaaatgccgcgtaagagaattaaacctggcactgttacatatggcatcatgttggatgggttgtttcgtgctgggagaactgttgccgcaaagaaaatgttccatgagatgaacgagagtggaacaacggtggacatttccacatacgctataatacttggaggtttttgtagaaataattgtgcagacgaagctatcaccctattccacaaattaggtgcaatgaatgtgaagttcaatattgcaatagtcaataccatgatcaatgcaatgtacaaggttgggagaagagaagaagctaaggaactatttgctggaatattagcccgtgggttggtgcctaatgaatctacttacggagtaatgataaaaaatcttctaaaagatggagcagtggaagatgctaacaatgtgttttcatcaatggacaagagtggtatagtccccagctcccgtctcatcaatgacatcatcagattgttgttggaaaaaggtgagatcgccaaggccggatattatttgtctaaagttgatgggaagagcatatcacttgaagcttcaactacttcattgatgttttctctcttctcaaggaaaggcaaatataaggagaacatgaaattgctccctgccaagtatcaatttttcgatgtgttggttgac

SEQ ID NO: 2632 - DNA, 912 bp, Triticum aestivum
atgtttgaaatgatgaacggtggtattcttcggcctaacattgtgttcttcaattcagtaataaacagtctgtacaaagaaggaagggttatggatgcacatgatgtcttagacttggttataggcataggtgagaggcctgataccattacatttagttcactgattgacggatattgcttagtcgggaagacggataaagcattcaaaatacttgatgccatggaatcagttggtgttgagcctgatattgttacttacaatacactgcttgatggctattttaaaaacagaaggattgatgatgctttgactttgtttagagaaatgccgcgtaagagaattaaacctggcactgttacatatggcatcatgttggatgggttgtttcgtgctgggagaactgttgccgcaaagaaaatgttccatgagatgaacgagagtggaacaacggtggacatttccacatacgctataatacttggaggtttttgtagaaataattgtgcagacgaagctatcaccctrttccacaaattaggtgcaatgaatgtgaagttcaatattgcaatagtcaataccatgatcaatgcaatgtacaaggttgggagaagagaagaagctaaggaactatttgctggaatattagcccgtgggttggtgcctaatgaatctacttacggagtaatgataaaaaatcttctaaaagatggagcagtggaagatgctaacaatgtgttttcatcaatggacaagagtggtatagtccccagctcccgtctcatcaatgacatcatcagattgttgttggaaaaaggcaacgaaaaaaatagcgcgctacaaaatatagcgaggcccttctccaaatgctacacaagttatagcgcgctaatagcatgctatatttcgaaa

SEQ ID NO: 2633 - DNA, 1002 bp, Triticum aestivum
atgaataggtcaagggcgatgaaggggttgaccgcggcgaggcgcgtcacggcgtcggtcgagacgacggctttgtccggcttgttgagcatgacgccggaggaggcctgtcaccgacaagtcttagacttggttataggcataggtgagaggcctgataccattacatttagttcactgattgacggatattgcttagtcgggaagacggaaaaagcattcaaaatacttgatgccatggaatcagttggtgttgagcctgatattgttacttacaatacactgcttgatggctattttaaaaacagaaggattgatgatgctttgactttgtttagagaaatgccgcgtaagagaattaaacctggcactgttacatatggcatcatgttggatgggttgtttcgtgctgggagaactgttgccgcaaagaaaatgttccatgagatgaacgagagtggaacaacggtggacatttccacatacgctataatacttggaggtttttgtagaaataattgtgcagacgaagctatcaccctattccacaaattaggtgcaatgaatgtgaagttcaatattgcaatagtcaataccatgatcaatgcaatgtacaaggttgggagaagagaagaagctaaggaactatttgctggaatattagcccgtgggttggtgcctaatgaatctacttacggagtaatgataaaaaatcttctaaaagatggagcagtggaagatgctaacaatgtgttttcatcaatggacaagagtggtatagtccccagctcccgtctcatcaatgacatcatcagattgttgttggaaaaaggtgagatcgccaaggccggatattatttgtctaaagttgatgggaagagcatatcacttgaagcttcaactacttcattgatgttttctctcttctcaaggaaaggcaaatataaggagaacatgaaattgctccctgccaagtatcaatttttcgatgtgttggttgac

SEQ ID NO: 2634 - DNA, 987 bp, Triticum aestivum; identical to SEQ ID NO: 2631

SEQ ID NO: 2635 - DNA, 987 bp, Triticum aestivum; identical to SEQ ID NO: 2631

SEQ ID NO: 2636 - DNA, 708 bp, Triticum aestivum
atggactgctgctgccgcgcacaccgcctcgatctggcgttcgctttcttcggccgtctcctcaggacgggacttaaggcaggcgtcattcaagtttgcactcttctcaagggcctctgccgcgcaaagcgggctgatgaggctctcgacgtgctgcttcacaggatgcctgagctggggggctgcacccccaacgtggtggcgtataccacggtcatccacggcttctttaaggaaggccaaataagcaaggcatgctatctattccatgaaatggcgctgcagggcgttacacctgatgtggtgacatatagctcggttattgatgcgctgtgcaaggccagagccatggacaaggcagagtatttccttcgtcagatggttcataatggtgtcctacctaataatgtgacatataatagcctcatccatggatattcctcttcaggccattggaaggaggcggttagggtgctgaaagaaatgacaagtcaaggtatcataccggatatcgtttcataccgtattctgcttcatgggtatgccaccgaagggtgcttagttgatatgattaatctcttcaattcaatggcaagatactgtattctacctgattgtcatatcttcaacatactgattaatgcatatgctaaatctgggaagcttgataaggctatgcttatatttaaagaatgcagaaacaaggag

SEQ ID NO: 2637 - DNA, 945 bp, Triticum aestivum
atggctcgcctctgctacaccacgcccatgccgcacctccgccgctgctgctcctcttccacctcgccgccttcacgccactgggacccccgacccgcctttgccgcggccacggagcgcgtccgcgccgggacgctcagccctgaagacgcacaccacctgtttgacgaattgctactgcaggccaaccccgtccccgagcgttccttcaacgacttccttgccgcgctcgcccgggctctgtcctccgctgctctcagagatggacactcccttgctctcggcatcttcaaccgtgtctgccgagaagaagcagggccgtgcgtgacgccacccacagtctgcacctacaacatcctcatggacagttgctgtcgtgcatgccacccgaacctaggccctgctttcttcggccgcttcctcaggacgggcctcaaggcagaccagatcgtcgccatcaacctcctcaagtgcctctgccacgcaaaacggaaggatgaggctgtcaacatgctgcttcataggatgtctgagttcggttgtgtgcctgatgccatctcatactccatagtacttaagagcttatgtgacgatagcaggagccagcaagcgctcgatctgctccagatggtaaggaaaggaggtgcctgctccctcgatgtggtggcatatagcacagtcatccgcagcttctttaaggagggtgaagtaagtaaggcatgcaatctattccatgaaatggtgcaacaagggattgtgcctaatgtggtgacatatagcttgattattgatgccttgtgcaaggtcagggcaatggacaaggcaaagctggtccttcagcagatggttgataatggtgttcgaccaaatatgtatacatgcatggaactcattcatgtactccctttgcaagaatggaggaagcaaagaagctgcagaattttt

SEQ ID NO: 2638 - DNA, 945 bp, Triticum aestivum; identical to SEQ ID NO: 2637

SEQ ID NO: 2639 - DNA, 945 bp, Triticum aestivum; identical to SEQ ID NO: 2637

SEQ ID NO: 2640 - DNA, 945 bp, Triticum aestivum; identical to SEQ ID NO: 2637

SEQ ID NO: 2641 - DNA, 945 bp, Triticum aestivum
atggctcgcctctgctacaccacgcccatgccgcacctccgccgctgctgctcctcttacacctcgccgccttcacgccactgggacccccgacccgcctttgccgcggccacggagcgcgtccgcgccgggacgctcagccctgaagacgcacaccacctgtttgacgaattgctactgcaggccaaccccgtccccgagcgttccttcaacgacttccttgccgcgctcgcccaggctctgtcctccgctgctctcagagatggacactcccttgctctcggcatcttcaaccgcgtctgccgagaagaagcagggccgtgcgtgacgccacccacagtctgcacctacaacatcctcatggacagttgctgtcgtgcatgccacccgaacctaggccctgctttcttcggccgcttcctcaggacgggcctcaaggcagaccagatcgtcgccatcaacctcctcaagtgcctctgccacgcaaaacggaaggatgaggctgtcaacatgctgcttcataggatgtctgagttcggttgtgtgcctgatgccatctcatactccatagtacttaagagcttatgtgacgatagcaggagccagcaagcgctcgatctgctccagatggtaaggaaaggaggtgcctgctccctcgatgtggtggcatatagcacagtcatccgcagcttctttaaggagggtgaagtaagtaaggcatgcaatctattccatgaaatggtgcaacaagggattgtgcctaatgtggtgacatataggttgattattgatgccttgtgcaaggtcagggcaatggacaaggcaaagctggtccttcagcagatggttgataatggtgttcgaccaaatatgtatacatgcatggaactcattcatgtaccccctttgcaagaatggaggaagcaaagaagctgcagaattttt

SEQ ID NO: 2642 - DNA, 945 bp, Triticum aestivum; identical to SEQ ID NO: 2637

SEQ ID NO: 2643 - DNA, 945 bp, Triticum aestivum; identical to SEQ ID NO: 2637

SEQ ID NO: 2644 - DNA, 1080 bp, Triticum aestivum
atgactgccaaaggccacagagctaatgttgtctcgtactgtattttgcttcatgggtatggcaatgaaggatgctttgctgatatgattgacctctttaattcaatggaaaggaatggcattgcagccgactgccgtgttttcaacatattaatcgatgcgtatgctaaacatggaatgacggatgaagctatgctcatatttacggaaatgcgggaaaaaggagcaggtcctgatgcgttcacctattccactgtaatagccgcactttccagaatgggtaggttgaccgatgctatgggcaagttcagtcagatgattgccatgggagttcaaccggacacaactgtttatcactccctgattcagggttgttgtttacatggtgatttggttaaagccaaggagctggtttgtgaaatgatgaacaaaggtattcctcgtcctagcattgtgttcttcaattcagtaataaacagtctgtgcaaagaaggaaggattatggatgcacacgatatctttgacttggttatagacataggtgagaggcctgatgccattacattcagttcactgattgacggatattgcttagtcggcaatatggataaagcattaaaagtacttgatgtcatggaatcagttggtgttgagcctaatgttattacatacaatacacttgttaatggctattgtagaaatggaaggatcgatgatagtttgactctgttcagagagatgccgcgtaagagaattaaacctgacactgtttcatattgcataataatgaatgggttgtttcgtgctgggagaactgttgccgcaagaaaaatgttccatgagatgacggaaaatggaataacagtgagtatttctacatacagtataatacttagaggtctttgtagaaataattgtgcagacgaagctatcaccctgttccagaaattaggaacaatgaatgtaaagtttgatattgcaatactcaataccatgattaatgcaatgtacaaaggttcaaagaaaggaagaagcaaaggaattgtttgctacaatatcagccaatgggttggtgcccaa

SEQ ID NO: 2645 - DNA, 1002 bp, Triticum aestivum
atggcaagtgttggtgttcaaccaaatgctgtcactttgaactcattaatcgattccctttgcaagcacagaaggacaaaggaagctagagaaatttttgactccatggccgcaaagggcctgaaacctaatatcgtctcctactctactatgcttaatgggtatgtcaaagaaggatgcttcgatgatatgactgatctcttcaattcgatggtacggaatggtatcgtacctaaccaccatattttcaacatactgatcaatgcatatgctaaacgtggagtgatggatgaggctatgcacatgttcgaagtaatgaggcaacaaggagtaaacccagatgtatttagctatcaaattgtaatggattcacttcgcaaaatgggcaggatggatgctgctctggacaaatttaatcagatggtcaatcaaggagtttcacctaacatagttgtttaccaatgcctggttctgggttcttgttctcatggtgattttgtgaaggccaaggaattgatttctgaagctgttaatagaggtctgtgttctaacagtgtgttcttctattctgtaataaatgacctgtgcaaagaaggaaaggtgaaggaggcacaggatatgtttcacttcattgtaggtattggtcagcggcctgatgtgattatgtacacttcactgatggatggatattgccttgttggcaaggtggaggaagcactgagagtacttggtgctatgaagtctgctggcctccaacctactgctgttacgtatggtatacttcttaatggctactgtaaaattggaaggatcgccgctggattgagtcttttcaaggaaatgtcactcagcggggttaagcccactactattttttttcgagaaaacgcaaaagagtttgcgtttcatttcattgaacaggaagagaacagcagtacaggtacaacctcccagaaggagggacacacgcacacacaccatcgtcctcaccagacaagcagg

SEQ ID NO: 2646 - DNA, 1143 bp, Triticum aestivum
atgctttttgcaaaaaagggtaggttggatgatgctgtgataaagtttaatcagatgattgatgcaggagtacgaccggacgcatctgtttatcgttccctaatccagggtttttgtacacatggcgatttggtgaaagcaaaggaatatgttactgaaatgatgaagaaaggtatgcttcctcctgatattatgttcttcagttcaatcatgcagaaactatgcacagaaggaagggtaatagaagcacgagatatccttgacttgatagtgcgcattggtatcaggcctgatgttttcatatttaatatactgatcggtggatactgcctagtccgcaagatggcagatgcatcaaaaatatttgatgatatggtgtcatatggtttagaaccttgtaatagtacgtatggtatacttattaatggctattgcaaaaacggaaggattgatgacgggctgattctgttcaaagaaatgttgcccaagggacttaaacctacaacttttaattacaacgtcatactggatggattatttctggctggacaaactgttgctgcaaaggagaagtttgatgagatggttgaatctggagtaagtgtgtgcatcgatacttactctatagttcttggtggactttgtagaaataattgtgccggtgaagcaatcacgctatttcagaaattaagcacaacgaatgtgaaattcgatattagaattgtcaatatcatgattgatgccttctaccgggttcggcgaaaccaggaagctaaggatttgtttgctgcagtatcagccaatggtttggtagctaatgtctttacctacaccgtaatgatgataaatcttatagaagaagggtcactggaagaagctgacactctctttttatcaatggagaggagcggctgtactgccaactcttatatgttaaatcatattatcagaaggttactggaaagaggagagatagtcaaggctggaaattatatgtcgaaagttgatgcaaagagctactcacttgaagctaaaactgtttcgctgctgatctccctctttttagggaaagggagatatagagaacacatgaaattgctccctatgaagtatcagtttctcgaagaagcagccacagttgaa

SEQ ID NO: 2647 - DNA, 1143 bp, Triticum aestivum; identical to SEQ ID NO: 2646

SEQ ID NO: 2648 - DNA, 1143 bp, Triticum aestivum; identical to SEQ ID NO: 2646

SEQ ID NO: 2649 - DNA, 1143 bp, Triticum aestivum; identical to SEQ ID NO: 2646

SEQ ID NO: 2650 - DNA, 999 bp, Triticum aestivum
atggttgatgaagtaatgcatatatttacaaaaatgcggcagcaaggactgaaccctgatgtagagaactatggagcggtagtaaacttgctttccaagattggccgaatggatgatgctatgtcccaattcaatcaaatgataactgaagggttagctcctgatgtcatagttttcaccccccttattagtggtttctgttcttgtggcaaatgggagaaggttgatgaactattttctgagatgttggatcgcggcatctgtcccgacacagtgttcttcaacactgttatggatcacctttgcaaaaatggaagggttatagaagcccaagatgtgttcgacctgatggtacacatgggtgtgaagcctgatgtgcgtagtcatgtcacactgatgcatggatactttgcagatggtaagatggatgaaatgaggaagttacttgaaaatatgtgctcaattggcttgaaacctgatgttgtcacctatagcatactgatagatagttactctaagaatggaaggatagatgatgcactggttgttttcagggaaatgttggacggtgttaagccttctattatcacttttaatattatgattggtgtgttgcttaaaggtagcaggaaggaagaagccaaagatttgtttgacggtatctgggccaaaggattagtgcctgacgttgttacatatagcttaatgatacaaaacttaatagaagaaggttctctacaagagtctgatgatctattcatttctatggagaagaatggatgtgctgccaactcctgtatgctgaatgctatagttagaagcttacttcagaaagaggagattcttagggctgggacttatctgtctaaaattgatgagaggaggttcacccttgaagcttccactgctagcttgttgactgcacttgtgtcagggggggaaggccaggaatataaggagttactccatgaaaaatactctgaactgctaatcgaggcc

SEQ ID NO: 2651 - DNA, 1125 bp, Triticum aestivum
atgaccgccaagggcctcaaacctgatattgtcgtgtactgtactcttcttcacgggtatgctaccgaaggatgcctcgccgatatgatcaatctctttaattcaatggaagacaatggtattgtagccaactgcaaagttttcaccatattaattgatggatatgctaaatgtggaatgatagatgaagctatgctcatctttaccaaaatgcgagaacaaggagtgagtcctaatgtattcacctatgcaattgtaacagctgcactttgcagaatgggcaggctgtctgatgcaatggacaaactaaatgagatgattgcaatgggcttacaaccgaacaaggttgtttatcgctctctaattcagggcttttgtacacatggtgatttggtgaaagcaaaggtcttggtttctgaaatgatgaacaaaggtattcctcgtccaaatatggtgttcttcaactcagtaataaacagtctatgcaaggaaggaagggttacagatgcacacgatatcttcgacttggctataaacattggtgagaggcctgacgttattacatttaattcactgattgacggacattgtttagccgggaagatggataaagcattcggagtacttgatgccatggtatcagctggcattgagcccaatgttgtcacatacaatacacttattgatggctattctagaaagggaaggattgatgatgggttgaccctattcagagaaatgatgcctaacaaaattaaacctacaactgctacatatggcgccatacttcatgggttgtttcgtgctggcagaacttctcctgcgaagaaaatgttcaatgagatgattgaaagtgaaacaacagtgaacatttccatatatgctataattcttggaggactttgtagaaacaattgcgttgatgaagcaattgtcttgttcgagaaattaggtgcaatgaatgtgaagttggatgttggaatattcaatactatgattaatgcaatgtacgcggttaagggaagagaagaagctaaggatttgtttgctgcaatatcagccaatgggctggtacctaatgcgtcttcttatggtgttatgataacaaatcttctaagagaggat

SEQ ID NO: 2652 - DNA, 1080 bp, Triticum aestivum
atgagccgccgctttgtccccgtcgacagacgcatcttggagcggaacatcaaggctcggtaccacgccggagacattggcacccaggacgcactccacctgttcgacgaattgatccaggttgctgggccttcctcggtccgtgccatcaactgcctcctcaccgtcgtcggccgtgattgccctgcgctcggtgtctccctcttcaaccgcgtcgcaagaaccaaggtgcctccccacaatgtcacctatggcattctagttgactgctgctgccgtgctggccgcctggaccttggacacgctgccatgggacgcgtcattaagttgggatttacagcagaagctatcgtcaatttcagccacctactcaaggccatctgtgcagagaagaagaccagttatgcaatggacatcgtactccggataatgcccgagtttaactgcatgccaaacattttctcgtataacattcttttcaagggtctctgcaacgagaagagaagccaagaggctctcgacctgattcaaattatggttgaggatggaggttgctgccgacctgatgtggtgacctatagcactgtaattgatggcttgttgaaagagggtgaggtaggcaaggcttacaggctattttctgaaatgctacagagggggatttcgccaaatgctgtgacctatagctcaatcatctgtggcatgtgcaggcttcatctgatggacaaggctgaggaggttcttcaacagatgtttgatagagaaattctgccagatgttgctacatatactagtctaatacatggatattattcattaggacagtgcgaggaggtggatcggattttcaaagaaatgtctagaaatggtgttcaaccagatatcgtaacttataacatacagatggattatctttgcaagaatggaagatgcgcagaagctaggaagatttttgattccatggtcagtttgggccaaaaaccgactgttactacctacagcattctgcttcatgggtatgctatagaaagatttttgattccatgcccgggcgtcgacccgttggttgggcagctgggt

SEQ ID NO: 2653 - DNA, 1026 bp, Triticum aestivum
atgtcccgcatccacctccaccgctgcctctactcctccacctcgcggcccttgcgttcctggtctccccgcgccgcctttgccgcggcaacagagcgcgtccgcgctggggcgctcagccaagacgatgcacaccacctgttcgacgaattgctgcggcaggccaccccggtccccgggcgctccctcaacggcttccttgccgccctcgcccgtgcgccggcctccgaagtctgcagagatgggcccgccctcgccctcgccctcttcaatcgcgtctgtcgtgatgaagccggcgcgcctctcacagtccacacctacggcatcctcatgggctgctgctgccgtgggcatcgcccggacctagggcttgccttattcggtcgcctccacaggacgggcatcaagacaaaccagatcgccgtcaacaccttccttaagtgcctctgttacgcaaaacggacggatgaagctgtgaacgtgctgcttcataggatgtccgagctcggctgtgtgcctaatgccttctcatactccattgttctgaagagcttatgctacaatagcatgagtcagcgggcgctcgacctgctccagatgatggcgaaagaaggaggtgcctgctcccccaacgtggtgacatataccacggtcatccatggcctctttaaggaaggcgaaacaggcaaggcatgcaatctattccatgaaatgaagcagcaagggattgagcccaatgtggtgacatatacctcgagcattgatgcgttgtgcaaggccagagcaatggacaaggcagagctagtccttcggcagatggttgctaatggtgctcaacccaatgaagtgacatataattgcatgatccatggatattccacatcagggcagttgaaagaggctgctaaaatgttcagagaaatgacaagtcagggtcttataccagataactttacttgcagctcgttaatgacttccctttgcaagcatcaaagaagcaaagaagctgcagaaatttttatgcca

SEQ ID NO: 2654 - DNA, 1122 bp, Triticum aestivum
atgggtaggatggatgctgctctggacaaatttaatcagatggtcaatcaaggagtttcacctaacaaagctgtttaccaatgcctggttctgggttcttgttctcatggtcattttgtgaaagccaaggaattgatttctgaagcagttaatagaggtctgtgttctaacagtgtgttcttctatcctgtaataaacgacctgtgcaaagaaggaaaggtgaaggaggcacaggatatgtttgacttcattgtaggtattggtcagcggcctgatgtgattatgtacaattcactgatggatggatattgccttgttggcaaagtggaggaagcactgagagtacttgatgctatgaagtctgctggcctccaacctactgctgttacgtatggtatacttcttaatggctactgtaaaattggaaggattgccgctggattgagtcttttcatggaaatgtcactcagcggggttaagcccactactattatgtacaacattatacttgatgggctgtttcgctccgggagaacagattctgcaaaggaaaaattccgtacgatgagcgaaagtggcataccagtgggcattgacacatacaacatagttcttagtggactttgtaaaaataattgcgctggtgaagcaatagagctgttcaagaaactacgtgcaatgaatgtgaagattgatgtcaaaacactcactatcatgatttctgcaatgtttaaaagtaggagaattgaagaagccaaggagttgtttgctactatatcagccatcgggttggtgccttctgttgtgacttacagtgtaatgatgacgaatttcataaaagaagggtcgctggcagagactgatgatatgtttttagcaatggagaaggctagctgtgctcccgactccatcctgctaaatcaagtggtcagggcgttgctggaaaaaggtgcagttgtaaaggctgcaacttatctcgctaaacttgatgctaaacagctgtcagttgaagcttcaacgatttcgttaatagtatctctcttctcaggggaagggaaactaagggagcacgtagagttgcttccagtaaagtaccagcctcctgagagttcgactgacaat

SEQ ID NO: 2655 - DNA, 885 bp, Triticum aestivum
atgtttgacttcattgtaggtattggtcagcggcctgatgtgattatgtacaattcactgatggatggatattgccttgttggcaaagtggaggaagcactgagagtacttgatgctatgaagtctgctggcctccaacctactgctgttacgtatggtatacttcttaatggctactgtaaaattggaaggattgccgctggattgagtcttttcatggaaatgtcactcagcggggttaagcccactactattatgtacaacattatacttgatgggctgtttcgctccgggaggacagattctgcaaaggaaaaattccgtacgatgagcgaaagtggcataccagtgggcattgacacatacaacatagttcttagtggactttgtaaaaataattgcgctggtgaagcaatagagctgttcaagaaactacgtgcaatgaatgtgaagattgatgtcaaaacactcactatcatgatttctgcaatgtttaaaagtaggagaattgaagaagccaaggagttgtttgctactatatcagccatcgggttggtgccttctgttgtgacttacagtgtaatgatgacgaatttcataaaagaagggtcgctggcagagactgatgatatgtttttagcaatggagaaggctagctgtgctcccgactccatcctgctaaatcaagtggtcagggcgttgctggaaaaaggtgcagttgtaaaggctgcaacttatctcgctaaacttgatgctaaacagctgtcagttgaagcttcaacgatttcgttaatagtatctctcttctcaggggaagggaaactaagggagcacgtagagttgcttccagtaaagtaccagcctcctgagagttcgactgacaat

SEQ ID NO: 2656 - DNA, 1122 bp, Triticum aestivum; identical to SEQ ID NO: 2654

SEQ ID NO: 2657 - DNA, 1110 bp, Triticum aestivum
atgataagtcttggtgttgtaccaaatgctatcatgtggaactcatttatggattcactttgcaagcatagaaggacaaaggaagctagagacatttttgactccatggctgcaaagggccaaaaacctgatattttctcctattctactatgcttaacgggtatgcgaaagaaggatgctttgatgatatgacttgtctcttgaatttgatgctacagaatggtgttgtacctaaccaccatattttcaacatactgatcaatgcatatgctaaacctggactgatggatgaggctatgcacatgtttgaagtaatgaggcaacaaggagtaaacccggatgtatttgactatcaaatcataatggattcactttataaaatgggtaggatggatgctactctggacaaatttaatcagatggtcaatcaaggagtttcacctaacaaagctgtttaccaatgcctggttctgggttcttgttttcatggtcattttctaaaagccaaggaattgatttctgaagcagttaatagaggtatgtgttctaacagcatgttcttctatcctgtaataaacgacctgtgcaaaggaaaggtagaggaggcacaggatatttttgacttcattttaggtattggtcagcggcctgatgtgactatgtacaattcactgatggatggatattgccttgttggcaaggtggaggaagcactgagagtacttgatgctatgaagtctgctggcctccaacctgatgctattacgtatgctatacttcttaatggctactgtaaaattggcaagatcaccgacggattgagtcttttcagggaaatgtcactcagcggggtaaagcccacaactattatgtacaacattatacttgacgggctgttttgctccgggagaacagtttctgcaaaggaaaaattcaatacgatggttgaaagtggcttaccagtggacgtttgcacatacaacatagttctctgtggactttataaaaacaattgcactggtgaagcaatagagttgttcaagaaactacgtgctataaacatgaagattgatgtcataatactcaataccataatttctttaattttt

SEQ ID NO: 2658 - DNA, 1053 bp, Triticum aestivum
atggaaaaatcttttcatgatatgcattgtctcattgatttgatggtagaaaatggtattgcaccagatcatcatgtctacaacatactcatatctgcatgtgctcaagaagaaatggttagtgacgtaatgcatatatttacaaaaatgcggcagcaaggattgaaccctaatgtagcgaactatggagtggttgtaaacttgctttgcagcatgggccgaatggatgatgctatgtaccaatacaatcaaatgataaccgaaggattagatcctgatatcatagttttcagcacccttataagtggtttttgttcttgtggcgcatgggagagggttcatgaaatattttctgaaatgttgaatcgtggcatctatcctgataccgtgttcttcaacataattatggaccacctttgcaaagagggaagggttatggaagcccaggatatcttcgacctgatggtacacatgggtgtgaagccttttgtccgtgattacaacacactgatacatggatactgtttagttggtaagatggacgaagggaggaagttacttgacaatatgtgctcaattggcttgaaaccggatgatttcacctatagcatactgattgatggttactctatgaagggaaggatagatgatgcattgattgttgtcagggaattgttggacgggaaggttggaccttctattatcacttttaatattatgattgttgcgttgcttaaaggtgggagaaaggaagaagccaaagatttgtttgatggtatctgggccaaaggattagtgcccgatgttgttacatatagcttaatgatacaaaaacttatagaagaaggttctctacaagagtctgatgatctattcctttctatggagaagaatggatgtgctgccgattcccgcatgctaaatgatatagttagaagcttacttcagaaagggacaatgcaagtatcaatggagtatgcaacggaggcaagcctagcaaggttgccattcaaaatatatcatgcactcagggaagcaacgaaaatgccatca

SEQ ID NO: 2659 - DNA, 675 bp, Triticum aestivum
atgatgagcaaaggtattcctcgtcccaacattgtgttcttcaattcagttataaactatttatgcaaagaaggaagggttatggatgcacaagatatctttgaatttattataagcatagatgagagacctgatgtcattacatttaactcgctgattgacggatattgcttagtcagcaagatggataaagcatctggagtacttgatgccatggtatcagctggcattgagcctaatgttgttacatataatacacttgttagtggctattctataaatagaaggatcgatgatggtttgactctgtttaggcaaatgccacttaagagaataaaacctgacagtgttacatatggcatcatactggatgggttttttcgtgctgggagaactgttgctgcaaggaaaatgttccatgagatgatcgaaaggggtataccagtgaccatttccatatacaatagaatacttggaggtctctgtagaaataattgtgcagacgaagccatcgcactattccagaaattaggagcaatgaatgtgaagttcgatattataacacttaataccatgattaatgcatgttcaaggttcgaagaagagaagaagctaacgatttgtttgctgcaatatcagccagtgggttggtgcctaatgcttctacttacggca

SEQ ID NO: 2660 - DNA, 975 bp, Triticum aestivum
atgatgagcaaaggtattcctcgtcccaacattgtgttcttcaattcagttataaactatttatgcaaagaaggaagggttatggatgcacaagatatctttgaatttattataagcatagatgagagacctgatgtcattacatttaactcgctgattgacggatattgcttagtcagcaagatggataaagcatctggagtacttgatgccatggtatcagctggcattgagcctaatgttgttacatataatacacttgttagtggctattctataaatagaaggatcgatgatggtttgactctgtttaggcaaatgccacttaagagaataaaacctgacagtgttacatatggcatcatactggatgggttttttcgtgctgggagaactgttgctgcaaggaaaatgttccatgagatgatcgaaaggggtataccagtgaccatttccatatacaatagaatacttggagatctttgtagaaataattgtgcagacgaagccatcgcactattccagaaattaggagcaatgaatgtgaagttcgatattataacactcaataccatgattaatgcaatgttcaaggttcgaagaagagaagaagctaacgatttgtttgctgcaatatcagccagtgggttggtgcctaatgcttctacttacggcataatgataaaaaatattctaaaggaaggatcagtggaagaaattgacaatatgttttcatcaatggagaagagtggtatagttcccagctctcatcttataaatgatattataagaatgttgttggaaaaaggtgagattgccagggccggatattatttgttgaaagttgatgggaagaacaccttgcttgaagcttcaactacttcactgatgttgtccctcttttctagggaagggaaatatcaggaggacgtgaaattgctccctgcaaagtatcaatttttctatggatttggt

SEQ ID NO: 2661 - DNA, 975 bp, Triticum aestivum; identical to SEQ ID NO: 2660

SEQ ID NO: 2662 - DNA, 675 bp, Triticum aestivum; identical to SEQ ID NO: 2659

SEQ ID NO: 2663 - DNA, 975 bp, Triticum aestivum; identical to SEQ ID NO: 2660

SEQ ID NO: 2664 - DNA, 975 bp, Triticum aestivum; identical to SEQ ID NO: 2660

SEQ ID NO: 2665 - DNA, 1074 bp, Triticum aestivum
atgataatggtatttcaccagatcattatggctacaacatactcatatctgcttatgctaaagaaaaaaatggttgatgatgtattgcatatatttacaaaaatgcggcagcaaggattgaaccctgatgttgcgaactatggagcggtaataaacttgctttctagtattggccgaatggatgatgctatgtcccaatacaatcaaatgataaatgaagggttagctcctgatatcatagttttcaactcccttattagtggtttctgttcttgtggcaaatgggagaaggttcatgaactattttctgagatgttggatcgcggcatctgtcccaacacagtgttcttcaccactattatggaccgcctttgcaaaaatggaagggttatggaagcccaagatctcttcgacctgatggtacacatgggtgtgaagcctgatgtgtggacttataacacactgataggtggatacttgttcattggtaagatggatgaagtgagcaagttacttgacaatatgtgctcaattggcttgaaaccaaatgttttcacctatggcatactgatcgatggttactctaagaatggaagtatagatgatgcactggttgttatcagggaaatgttggacggtgttaagccttctattatcacttttaatattatgattggtgtgttgcttaaaggtagcaggatggaagaagccaaagatttgtttgacggtatctgggccaaaggattagtgcctgacgttgttacatatagcttaatgatacaaaaactaatagaagaaggttctctacaagagtctgatgatctattcgtttctatggagaagaatggctgtgctgccgactcctgtatgctaaatgctatagttagaaggttacttcagaaaggggagattcttatggctgggacttatctgtctaaaattgatgagagaagattcagctttgaagcttccacagctagcttgttggctgcacttgtgtcaggggggaaaggccaggaatataaggagttactccccgaaaaataccactattttctggaacagggcactgat

SEQ ID NO: 2666 - DNA, 1074 bp, Triticum aestivum; identical to SEQ ID NO: 2665

SEQ ID NO: 2667 - DNA, 1032 bp, Triticum aestivum
atggcaaaaggagatgattgctccccctgtgtgctgtcatatagcacggtcatccatggcttctttaaggaaggggaagtaggcatggcatgcaatctattccatgaaatgacccagcaaggggttgtgcctaatgtggtgacatataactcgattatcgatgcaatgtgcaaggcaggagcaatggacaagacggagctggtccttcggcaaatggttgataatggtgtccgaccggataaagtaatatataatagtatgatccatggatattcaactttgggccggtggaaagaggcgggtaaaatgttcagagaaatgacaagccggggtcttataccagatattttcacttggaactcgttcatgggctccctttgcaagcatggaagaagcaaagaagctgcagaaattttcttttccatggccgcaaagggctacaaaactaatattgtctcctacattgctcttcttcgtgtgtatgccaatgaaggaagctttgctgatatgatgagtctatttaattcaatggaaggcaacggtattgtagccaactgccaagttttcaccatattaattgatgcatatgctaaacaaggaatgattgatgaagctatgctcatacttactgacatgcggggacaaggactgagtccggatgtattcacctattcaactctaatatctgcactttgcagaatgggtaggctggctgatgctatggataagttcagtcagatgattggcatgggagtacaaccgaacacagttgtttatcactccctagttcagggcttatgtacacatggtgatttggcgaaagcggaggagttagtttctgaaatgatgaataaaggtattgctcgtccaaacaaatcgttagcttcttcctttttgtatcattactccataagtggaagcattaggcgggttggtgccaaccctgcgtatatccgtgtatctatttgccagcatatatccgtgtgtgacaaccctgcggagacaatccgttgcagttgtcatccttctttt

SEQ ID NO: 2668 - DNA, 975 bp, Triticum aestivum
atgatgaacaaaggtattcctcgtcctagcattgtgttcttcaattcagtaataaacagtctgtgcaaagaaggaaggattatggatgcacacgatatctttgacttggttatagacataggtgagaggcctgatgccattacattcagttcactgattgacggatattgcttagtcggcaatatggataaagcattaaaagtacttgatgtcatggaatcagttggtgttgagcctaatgttattacatacaatacacttgttaatggctattgtagaaatggaaggatcgatgatagtttgactctgttcagagagatgccgcgtaagagaattaaacctgacactgtttcatattgcataataatgaatgggttgtttcgtgctgggagaactgttgccgcaagaaaaatgttccatgagatgacggaaaatggaataacagtgagtatttctacatacagtataatacttagaggtctttgtagaaataattgtgcagacgaagctatcaccctgttccagaaattaggaacaatgaatgtaaagtttgatattgcaatactcaataccatgattaatgcaatgtacaaggttgggagaagagaagaagctaaggatttgtttgctgcaatatcacacagtggcttggtgcccaatgaatctacttataaggtaatgataaaaaatcttctaaaagacggagcagtggaagatgctgacaatatgttttcatcaatggacaacagtggtatcgttcccagttcccttcttataaatgatatcatcagaatgttgttggaaaaaggtgagatagccaaggctggaaattatttgtctaaagttgatgggaagagtatctcacttgaagcttcaactgcctcattgatgttgtctctcttttcaaggaaagggaaacatcaggaggatattaagttgctccctgcaaagtatcaatttttcgatgggtttggt

SEQ ID NO: 2669 - DNA, 975 bp, Triticum aestivum; identical to SEQ ID NO: 2668

SEQ ID NO: 2670 - DNA, 975 bp, Triticum aestivum; identical to SEQ ID NO: 2668

SEQ ID NO: 2671 - DNA, 975 bp, Triticum aestivum; identical to SEQ ID NO: 2668

SEQ ID NO: 2672 - DNA, 975 bp, Triticum aestivum; identical to SEQ ID NO: 2668

SEQ ID NO: 2673 - DNA, 975 bp, Triticum aestivum; identical to SEQ ID NO: 2668

SEQ ID NO: 2674 - DNA, 759 bp, Triticum aestivum
atgattattgtacacatggtgattgtacacatggttaaaaaaactctaattcagggttattgtacacatggtgatttggtgaaagcaatgggattggtttctgaaatgattaacagaggtattcctcctccagacattgtgttctttaattcagtaataaatagtctatgcaaagaaggaagggttacagatgcacaagatacctttgacttggttatatactttggtgagaggcccgacatctttacatttaactcgctgattgacggatattgcttagttggtgagatggagaaggctttcggagtacttgataccatggcatcaggtgggattgagcctgatagtatttcatataatacaattgttaatggatattttaaaaatgataggattgatgatggattggccttattccgagaaatgctgaagaaagttaaacctacaactgttacatataacatcatactggatgggttatttggtgctgggaaaacagttgctgcgaagaaaacgttccatgagatgatcgaaagtggaataacagtgagcatatccacatacaggataatccttggtggactttgcaggaatagttgtgatgatgaagcgatcaccctgttccagaaattaggagcaatgaatgtcaagttggatattacaatactcaataccatgatcaatgcactgttcaaggttcagagaagagaagaagctaacaatttgtttgctacagtatcagccagtgttgattgtttt

SEQ ID NO: 2675 - DNA, 990 bp, Triticum aestivum
atgagattggtttctgaaatgattaacagaggtattcctcctccagacattgtgttctttaattcagtaataaatagtctatgcaaagaaggaagggttacagatgcacaagatatctttgacttggttacatactttggtgagaggcccgacatctttacatttaactcgctgattgacggatattgcttagttggtgagatggagaaggctttcggagtacttgataccatggcatcaggtgggattgagcctgatagtatttcatataatacaattgttaatggatattttaaaaatgataggattgatgatggattggccttattccgagaaatgctgaagaaagttaaacctacaactgttacatataacatcatactggatgggttatttggtgctgggaaaacagttgctgcgaagaaaacgttccatgagatgatcgaaagtggaataacagtgagcatttccacatacaggataatccttggtggactttgcaggaatagttgtgatgatgaagcgatcaccctgttccagaaattaggagcaatgaatgtcaagttggatattacaatactcaataccatgatcaatgcactgttcaaggttcagagaagagaagaagctaacaatttgtttgctgcagtatcagccagtggattggtacctaatgcttatacctattgcataatgataacaaatctaataaaagaaggatcagtggaagaagctgaaaatatgttcttattaatggagaagagcagttgtgctccggactctcgtcttataaactgtatcatcagaatattattggaaaaaggtgagattgtcaaggctggaaattatatgtctaaagttgatggcaagagcatctcacttgaagcttcaactacttcgttgttgatacatctctttgcaagtaaagggaaatatcaggaacagataaatttactccctgtaaagtaccgatttttcgaaggagtcagt

SEQ ID NO: 2676 - DNA, 990 bp, Triticum aestivum; identical to SEQ ID NO: 2675

SEQ ID NO: 2677 - DNA, 990 bp, Triticum aestivum; identical to SEQ ID NO: 2675

SEQ ID NO: 2678 - DNA, 759 bp, Triticum aestivum; identical to SEQ ID NO: 2674

SEQ ID NO: 2679 - DNA, 990 bp, Triticum aestivum; identical to SEQ ID NO: 2675

SEQ ID NO: 2680 - DNA, 972 bp, Triticum aestivum
atgatgaacagaggtattcctcgtccaaacattgtgttcaattcagtaataaacagtctgtgcaaagaaggaagggttatggatgcacatgatgtcttagacttggttataggcataggtgagaggcctaatgtcattacatttaattcactgattgacggatattgcttagtcgggaacatggataaagcattcaaaatacttgatgtcatggaatcagttggtgttgagcctaatgttgttacttatagtgcacttcttgatggctattctaaaaacagaaggattgatgatgctctgactttgtttagagaaatgccgcgtaagagaattaagcctgacactgttacatatggcatcatgttggatgggttgtttcgtgccgggagaactgtcgctgcaatggaaatgttccatgagatgactgaaagtggaacaacagtggacattgtcatatacaatataatacttggaggtctttgtagaaataattgtgtagatgaagcgattgcactgttccagaaattgcgagcaatgaatgtgaagttcaatattgaaatactcaataccatgattaatgcaatgtacaaggttcaaagaaaggaagaagcaaaggaattgtttgctacaatatcagccaatgggttggtgcccaatgaatctacttatgcagtaatgataagaaatcttctaagaggcggagcagtggaagatgctgacaatatgttttcatcaatggacaacagtggcatcgttcccagttccggtcttataaatgatatcatcagaatgttgttgaaaaaaggtgagatagccaaggctggcaattatttgtctaaagttgacgggaagagtatctcacttgaagcttcaactaccgcattgttgttgtctctcttttcaaggaaagggaaacatcaggtggatattaagttgctccctgcaaagtatcaattttttgatggatttggt

SEQ ID NO: 2681 - DNA, 1038 bp, Triticum aestivum
atgccgcgccttcaggtccgctctttctgcagctccttctcctcacgcgcctacgacctgctgaacgaactccaaggccatctggactccaggacgctcagaccagagctcgcgcgccaactgttcgacgaaatgctgcgccaaccagtcccagtaacggcgcgtgcactcaacggcttatttgctgcgctcgcgcgtgcgccgccttcaaccgcctgcactgatggccctgcgctcgccgtcgatctcttcaaccatatggcccgagcaggccgccgccggatgacaggacccaccgttcacacttacaacatactaattgactgctgccaccgagcatgccgcccagacctagggcctgccttctttggctgcctcctcaagacaggcatcacaatgagcgccattacctacagcagcctattcaagttcctctgtgacatgaggcgcacaaaggaggctctgaacgtgctgctccataggatgcccgatgacctgcctaatgtcatctcctactcagtgattctcaagagtttctgcgacagtgggaggagccagcttgcgcttgacctgctccgggtgatggccaaaaaaggtggtgaccactctcccgacgtgatggcatacaacatggtaatggatggcttgtttaaggagggtgaagtaagcaaagcatgtgatctattccacgaaatgatacaacagggggttgtgcctaatgaggtgacatatagctccataatcaatgcgctatgcaaagcaagagcaatggataaggcagaggtgatccttcgacacatggttcgtaatggtgtccaaccacatgatagtaggatatataataccctgatccatggatttttaacttcggatcagctgaaagaagcctttaggttgttgaaagtaatgagaagccatggtagtatgccaaacgttgttacttgcacctcagtcatggactacctttgcaagcatggaagaatcaaagaagctgaggaaatattttattccatggccgtgaatggccgaaaccaaata

SEQ ID NO: 2682 - DNA, 1035 bp, Triticum aestivum
atgccgcgccttcaggtccgctctttctgcagctccttctcctcacgcgcctacgacctgctgaacgaactccaaggccatctggactccaggacgctcagaccagagctcgcgcgccaactgttcgacgaaatgctgcgccaaccagtcccagtaacggcgcgtgcactcaacggcttatttgctgcgctcgcgcgtgcgccgccttcaaccgcctgcactgatggccctgcgctcgccgtcgatctcttcaaccatatggcccgagcaggccgccgccggatgacaggacccaccgttcacacttacaacatactaattgactgctgccaccgagcatgccgcccagacctagggcctgccttctttggctgcctcctcaagacaggcatcacaatgagcgccattacctacagcagcctattcaagttcctctgtgacatgaggcgcacaaaggaggctctgaacgtgctgctccataggatgcccgatgacctgcctaatgtcatctcctactcagtgattctcaagagtttctgcgacagtgggaggagccagcttgcgcttgaccttctccgggtgatggccaaaaaaggtggtgaccactctcctgacgtgatggcatacaacatggtaatggatggcttgtttaaggagggtgaagtaagcaaagcatgtgatctattccacgaaatgatacaacagggggttgtgcctaatgaggtgacatatagctccataatcaatgcgctatgcaaagcaagagcaatggataaggcagaggtgatccttcgacacatggttcgtaatggtgtccaaccacatgataggatatataataccctgatccatggatttttaacttcggatcagctgaaagaagcctttaggttgttgaaagtaatgagaagccaaggtagtatgccaaacgttgttacttgcacctcagtcatggactacctttgcaagcatggaagaatcaaagaagctgaggaaatattttattccatggccgtgaatggccgaaaccaaata

SEQ ID NO: 2683 - DNA, 1035 bp, Triticum aestivum
atgccgcgccttcaggtccgctctttctgcagctccttctcctcacgcgcctacgacctgctgaacgaactccaaggccatctggactccaggacgctcagaccagagctcgcgcgccaactgttcgacgaaatgctgcgccaaccagtcccagtatcggcgcgtgcactcaacggcttatttgctgcactcgcgcgtgcgccgccttcaaccgcctgcactgatggccctgcgctcgcggtcgatctcttcaaccatatggcccgagcaggccgccgccggatgacaggacccaccgttcacacttacaacatactaattgactgctgccaccgagcatgccgcccagacctagggcctgccttctttggctgcctcctcaagacaggcatcacaatgagcgccattacctacagcagcctattcaagttcctctgtgacatgaggcgcacaaaggaggctctgaacgtgctgctccataggatgcccgatgacctgcctaatgtcatctcctactcagtgattctcaagagtttctgcgacagtgggaggagccagcttgcgcttgacctgctccgggtgatggccaaaaaaggtggtgaccactctcccgacgtgatggcatacaacatggtaatggatggcttgtttaaggagggtgaagtaagcaaagcatgtgatctattccacgaaatgatacaacagggggttgtgcctaatgaggtgacatatagctccataatcaatgcgctatgcaaagcaagagcaatggataaggcagaggtgatccttcgacacatggttcgtaatggtgtccaaccacatgataggatatataataccctgatccatggatttttaacttcggatcagctgaaagaagcctttaggttgttgaaagtaatgagaagccaaggtagtatgccaaacgttgttacttgcacctcagtcatggactacctttgcaagcatggaagaatcaaagaagctgaggaaatattttattccatggccgtgaatggccgaaaccaaata

SEQ ID NO: 2684 - DNA, 1035 bp, Triticum aestivum
atgccgcgccttcaggtccgctctttctgcagctccttctcctcacgcgcctacgacctgctgaacgaactccaaggccatctggactccaggacgctcagaccagagctcgcgcgccaactgttcgacgaaatgctgcgccaaccagtcccagtaacggcgcgtgcactcaacggcttatttgctgcgctcgcgcgtgcgccgccttcaaccgcctgcactgatggccctgcgctcgccgtcgatctcttcaaccatatggcccgagcaggccgccgccggatgacaggacccaccgttcacacttacaacatactaattgactgctgccaccgagcatgccgcccagacctagggcctgccttctttggctgcctcctcaagacaggcatcacaatgagcgccattacctacagcagcctattcaagttcctctgtgacatgaggcgcacaaaggaggctctgaacgtgctgctccataggatgcccgatgacctgcctaatgtcatctcctactcagtgattctcaagagtttctgcgacagtgggaggagccagcttgcgcttgaccttctccgggtgatggccaaaaaaggtggtgaccactctcccgacgtgatggcatacaacatggtaatggatggcttgtttaaggagggtgaagtaagcaaagcatgtgatctattccacgaaatgatacaacagggggttgtgcctaatgaggtgacatatagctccataatcaatgcgctatgcaaagcaagagcaatggataaggcagaggtgatccttcgacacatggttcgtaatggtgtccaaccacatgataggatatataataccctgatccatggatttttaacttcggatcagctgaaagaagcctttaggttgttgaaagtaatgagaagccaaggtagtatgccaaacgttgttacttgcacctcagtcatggactacctttgcaagcatggaagaatcaaagaagctgaggaaatattttattccatggccgtgaatggccgaaaccaaata

SEQ ID NO: 2685 - DNA, 1035 bp, Triticum aestivum; identical to SEQ ID NO: 2683

SEQ ID NO: 2686 - DNA, 903 bp, Triticum aestivum
atgctgcgccaaccagtcccagtatcggcgcgtgcactcaacggcttatttgctgcactcgcgcgtgcgccgccttcaaccgcctgcactgatggccctgcgctcgccgtcgatctcttcaaccatatggcccgagcaggccgccgccggatgacaggacccaccgttcacacttacaacatactaattgactgctgccaccgagcatgccgcccagacctagggcctgccttctttggctgcctcctcaagacaggcatcacaatgagcgccattacctacagcagcctattcaagttcctctgtgacatgaggcgcacaaaggaggctctgaacgtgctgctccataggatgcccgatgacctgcctaatgtcatctcctactcagtgattctcaagagtttctgcgacagtgggaggagccagcttgcgcttgaccttctccgggtgatggccaaaaaaggtggtgaccactctcccgacgtgatggcatacaacatggtaatggatggcttgtttaaggagggtgaagtaagcaaagcatgtgatctattccacgaaatgatacaacagggggttgtgcctaatgaggtgacatatagctccataatcaatgcgctatgcaaagcaagagcaatggataaggcagaggtgatccttcgacacatggttcgtaatggtgtccaaccacatgataggatatataataccctgatccatggatttttaacttcggatcagctgaaagaagcctttaggttgttgaaagtaatgagaagccaaggtagtatgccaaacgttgttacttgcacctcagtcatggactacctttgcaagcatggaagaatcaaagaagctgaggaaatattttattccatggccgtgaatggccgaaaccaaata

SEQ ID NO: 2687 - DNA, 1035 bp, Triticum aestivum
atgccgcgccttcaggtccgctctttctgcagctccttctcctcacgcgcctacgacctgctgaacgaactccaaggccatctggactccaggacgctcagaccagagctcgcgcgccaactgttcgacgaaatgctgcgccaaccagtcccagtatcggcgcgtgcactcaacggcttatttgctgcactcgcgcgtgcgccgccttcaaccgcctgcactgatggccctgcgctcgccgtcgatctcttcaaccatatggcccgagcaggccgccgccggatgacaggacccaccgttcacacttacaacatactaattgactgctgccaccgagcatgccgcccagacctagggcctgccttctttggctgcctcctcaagacaggcatcacaatgagcgccattacctacagcagcctattcaagttcctctgtgacatgaggcgcacaaaggaggctctgaacgtgctgctccataggatgcccgatgacctgcctaatgtcatctcctactcagtgattctcaagagtttctgcgacagtgggaggagccagcttgcgcttgaccttctccgggtgatggccaaaaaaggtggtgaccactctcctgacgtgatggcatacaacatggtaatggatggcttgtttaaggagggtgaagtaagcaaagcatgtgatctattccacgaaatgatacaacagggggttgtgcctaatgaggtgacatatagctccataatcaatgcgctatgcaaagcaagagcaatggataaggcagaggtgatccttcgacacatggttcgtaatggtgtccaaccacatgataggatatataataccctgatccatggatttttaacttcggatcagctgaaagaagcctttaggttgttgaaagtaatgagaagccaaggtagtatgccaaacgttgttacttgcacctcagtcatggactacctttgcaagcatggaagaatcaaagaagctgaggaaatattttattccatggccgtgaatggccgaaaccaaata

SEQ ID NO: 2688 - DNA, 1038 bp, Triticum aestivum
atgccgcgccttcaggtccgctctttctgcagctccttctcctcacgcgcctacgacctgctgaacgaactccaaggccatctggactccaggacgctcagaccagagctcgcgcgccaactgttcgacgaaatgctgcgccaaccagtcccagtatcggcgcgtgcactcaacggcttatttgctgcactcgcgcgtgcgccgccttcaaccgcctgcactgatggccctgcgctcgccgtcgatctcttcaaccatatggcccgagcaggccgccgccggatgacaggacccaccgttcacacttacaacatactaattgactgctgccaccgagcatgccgcccagacctagggcctgccttctttggctgcctcctcaagacaggcatcacaatgagcgccattacctacagcagcctattcaagttcctctgtgacatgaggcgcacaaaggaggctctgaacgtgctgctccataggatgcccgatgacctgcctaatgtcatctcctactcagtgattctcaagagtttctgcgacagtgggaggagccagcttgcgcttgacctgctccgggtgatggccaaaaaaggtggtgaccactctcccgacgtgatggcatacaacatggtaatggatggcttgtttaaggagggtgaagtaagcaaagcatgtgatctattccacgaaatgatacaacagggggttgtgcctaatgaggtgacatatagctccataatcaatgcgctatgcaaagcaagagcaatggataaggcagaggtgatccttcgacacatggttcgtaatggtgtccaaccacatgatagtaggatatataataccctgatccatggatttttaacttcggatcagctgaaagaagcctttaggttgttgaaagtaatgagaagccatggtagtatgccaaacgttgttacttgcacctcagtcatggactacctttgcaagcatggaagaatcaaagaagctgaggaaatattttattccatggccgtgaatggccgaaaccaaata

SEQ ID NO: 2689 - DNA, 1038 bp, Triticum aestivum; identical to SEQ ID NO: 2688

SEQ ID NO: 2690 - DNA, 639 bp, Triticum aestivum
atgagcgccattacctacagcagcctattcaagttcctctgtgacatgaggcgcacaaaggaggctctgaacgtgctgctccataggatgcccgatgacctgcctaatgtcatctcctactcagtgattctcaagagtttctgcgacagtgggaggagccagcttgcgcttgaccttctccgggtgatggccaaaaaaggtggtgaccactctcccgacgtgatggcatacaacatggtaatggatggcttgtttaaggagggtgaagtaagcaaagcatgtgatctattccacgaaatgatacaacagggggttgtgcctaatgaggtgacatatagctccataatcaatgcgctatgcaaagcaagagcaatggataaggcagaggtgatccttcgacacatggttcgtaatggtgtccaaccacatgataggatatataataccctgatccatggatttttaacttcggatcagctgaaagaagcctttaggttgttgaaagtaatgagaagccaaggtagtatgccaaacgttgttacttgcacctcagtcatggactacctttgcaagcatggaagaatcaaagaagctgaggaaatattttattccatggccgtgaatggccgaaaccaaata

SEQ ID NO: 2691 - DNA, 1035 bp, Triticum aestivum; identical to SEQ ID NO: 2684

SEQ ID NO: 2692 - DNA, 1035 bp, Triticum aestivum; identical to SEQ ID NO: 2687

SEQ ID NO: 2693 - DNA, 1038 bp, Triticum aestivum; identical to SEQ ID NO: 2688

SEQ ID NO: 2694 - DNA, 975 bp, Triticum aestivum
atgatgaacaaaggtattcctcgtcctgacattgcgttcttcacttcaataataaatagtctatgcaaagaaggaagggttatggatgcacaaaatatctttgacttgcttgttgccatagatgagaggcctaatgtcattacatttaattcactaattgacggatattgcttagttggcgagatggataaagtattcagagtacttgatgccatgaaatcagttggtgctgagcctgatattgttacatacaatacacttgttaatggctattgtagaaatggaaggattgacgatgacttggctttgttcagggaaatgccatgtaagggaataaaacctgacactgttgcatattgcatcatactagatgggttgtttcatgccgggagaattgtcgttgcaaggaaaatgttccatgagatgatcgaaagtggaacaacagtgggcattcccatatacaatataacacttaaaggcctttctagaaataactgtgcacacgaagcgatagccatgttccagaaattaggtgcaatgaatgtgaagtttgatattgtcacactcaataccatgattaatgcattgtacaaggttggaaaaaaagaagaagctaaggatttgtttgctgcaatatcagccagcgggttggtgcctaatgcttccacttacagcataatgataataaattatctgaaggaaggatcagtggaagatgctaacaatattttttcatcaatggagaagagtggcatagctcccagttctcgtcttataaattatatcatcagaatatatttggaaaaaggtgagatcgccaaggctggagattatttgtccaaggttgatgggaagaacatcttacttgaagcttcaactacgtcgctgatgttgtctctcttttcaagaaacgggaaatatcaggagaatatcaaattgcttcctgcaaagtatcagtttttttatggatttggt

SEQ ID NO: 2695 - DNA, 975 bp, Triticum aestivum; identical to SEQ ID NO: 2694

SEQ ID NO: 2696 - DNA, 975 bp, Triticum aestivum
atgatgaacaaaggtattcctcgtcctgacattgcgttcttcacttcaataataaatagtctatgcaaagaaggaagggttatggatgcacaaaatatctttgacttgcttgttgccatagatgagaggcctaatgtcattacatttaattcactaattgacggatattgcttagtcggcgagatggataaagtattcagagtacttgatgccatgaaatcagttggtgctgagcctgatattgttacatacaatacacttgttaatggctattgtagaaatggaaggattgacgatgacttggctttgttcagggaaatgccatgtaagggaataaaacctgacactgttgcatattgcatcatactagatgggttgtttcatgccgggagaattgtcgttgcaaggaaaatgttccatgagatgatcgaaagtggaacaacagtgggcattcccatatacaatataacacttaaaggcctttctagaaataactgtgcacatgaagcgatagccatgttccagaaattaggtgcaatgaatgtgaagtttgatattgtcacactcaataccatgattaatgcattgtacaaggttggaagaaaagaagaagctaaggatttgtttgctgcaatatcagccagcgggttggtgcctaatgcttccacttacagcataatgataataaattatctgaaggaaggatcagtggaagatgctaacaatattttttcatcaatggagaagagtggcatagctcccagttctcgtcttataaattatatcatcagaatatatttggaaaaaggtgagatcgccaaggctggagattatttgtccaaggttgatgggaagaacatcttacttgaagcttcaactacgtcgctgatgttgtctctcttttcaagaaacgggaaatatcaggagaatatcaaattgcttcctgcaaagtatcagtttttttatggatttggt

SEQ ID NO: 2697 - DNA, 975 bp, Triticum aestivum
atgatgaacaaaggtattcctcgtcctgacattgcgttcttcacttcaataataaatagtctatgcaaagaaggaagggttatggatgcacaaaatatctttgacttgcttgttgccatagatgagaggcctaatgtcattacatttaattcactaattgacggatattgcttagttggcgagatggataaagtattcagagtacttgatgccatgaaatcagttggtgctgagcctgatattgttacatacaatacacttgttaatggctattgtagaaatggaaggattgacgatgacttggctttgttcagggaaatgccatgtaagggaataaaacctgacactgttgcatattgcatcatactagatgggttgtttcatgccgggagaattgtcgttgcaaggaaaatgttccatgagatgatcgaaagtggaacaacagtgggcattcccatatacaatataacacttaaaggcctttctagaaataactgtgcacacgaagcgatagccatgttccagaaattaggtgcaatgaatgtgaaatttgatattgtcacactcaataccatgattaatgcattgtacaaggttggaaaaaaagaagaagctaaggatttgtttgctgcaatatcagccagcgggttggtgcctaatgcttccacttacagcataatgataataaattatctgaaggaaggatcagtggaagatgctaacaatattttttcatcaatggagaagagtggcatagctcccagttctcgtcttataaattatatcatcagaatatatttggaaagaggtgagatcgccaaggctggagattatttgtccaaggttgatgggaagaacatcttacttgaagcttcaactacgtcgctgatgttgtctctcttttcaagaaacgggaaatatcaggagaatatcaaattgcttcctgcaaagtatcagtttttttatggatttggt

SEQ ID NO: 2698 - DNA, 975 bp, Triticum aestivum; identical to SEQ ID NO: 2694

SEQ ID NO: 2699 - DNA, 975 bp, Triticum aestivum; identical to SEQ ID NO: 2694

SEQ ID NO: 2700 - DNA, 975 bp, Triticum aestivum; identical to SEQ ID NO: 2694

SEQ ID NO: 2701 - DNA, 852 bp, Triticum aestivum
atgcactcaaatgaggcattggatctgctgctccaccggatgcccgaactggactgtgcgcctgatgtcttctcgttcaacatagtaatcaacggctgctttagagaaggtgaagtagacaaagcatgcaatctcttccatgagatgccccaactgggagttcaacctgatgtggtgacctacaactcaattatcatcgcactaagcagggccggrgcaatgggtaaggcagaagtggtccttcggcaaatggttgataaaggcattggacccgatgtcatgacatataacagtctgatccatggatattctactttgggtcagtggaaggcagcagttagggtattcaaagagatggtaagtgttggtgttctaccaaatgctgtcacgttgaactcatttatggattcactttgcaagcatagaaggacaaaggaagctagagatatttttgactccatggctgcaaagggccacaaacctaatattgcctcctactctactatgcttaatgggtatgcgaaacaaggatgcttcgatgatatgactggtctcttcaattcgatgctacagaatggtgttgtaccaaaccaccatattttcaacatactgatcaatgcatatgctaaacgtggactgatggatgaggctatgcacatgttcgaagtaatgaggcaacaaggagtaaacccagatgtatttagctatcaaattgtaatggattcactttgtaaatgggtaggatggatgctgctctggacaaatttaatcagatggtcaatcaaggagtttcacctaacaaagctgtttaccaatgcctggttctgggttcttgttctcatggtcattttg

SEQ ID NO: 2702 - DNA, 984 bp, Triticum aestivum
atgatgaacaaaggtatacctcgtcctgatattatgttcttccattcaatcatgcagaacctatgcacagaaggaagggtagtagaagcacgggatatccttggcttgatagcacacataggtatgaggcctaatgtttgcacatttaatatactgattggtggatactgcctagtccgcaagatggaggatgcctcaaaaatatttcatgatatgatgccatatggtttagaaccttctaatattacgtatggtatacttattaatggctattgcaaaaacttaaggattgacgatgggctgattctgttcaaagaaatgttgcgcaagggacttaaacctacaactttaaattataacattatactggatggcttatttctggctggacgaactgctgctgcaaaagagaagtttgatgagatggttgaatctggagcagatgtgtgcattgatacatactgtatagttcttggtggactttgtagaaataattgctacagcgaagcaatcatgctgttccagaaattaagcgcaatgaatgtgaaatttgatattacagttgtcaatatcattattggtgcattctacagggtccagagaaaccaagaggctaaggatttgtttgttgctataccagccaatggcttggttcctaattctgttacctacaccataatgatgagaaatcttataaaagaaggttcagtagaagaagctgacaatctttttttatcgatggagaatagcggctgtactgccaactctaatatgttaaatcttatcgtcagaatgttactggaaaaaggagagatagtcaaggctgggaattatatgtctaaagttgatgcaaagagctactcacttgaagctaaaactgtttcgctgctgatctctctcttttcagggaaagggaaatatagagaacacataggattgctccctacaaagtatcagtttcgtgaagaagcagccacggttgtg

SEQ ID NO: 2703 - DNA, 840 bp, Triticum aestivum
atgccagccgcccgcctgtcctccttcaaggctccttcacgagagcgccgacctcccctcgccgccttggctgccgccacggagcgcgtccgcgccggaacgctaagtcggcaggacgcgcaccacctgttcgacgaattgctgagccaagccgcgacagtcccagtacgcaagctgaacaactttcttgccgccctcgcccgtgcaccgccctcagctgcctgcagcgatggtccgggccttgccattgccctcttcaaccgcatgtcccgaggcgctggtgcacgggtggtgtcgcccacgctctgtacctattccatcctcatggactgctgctgccgtgcacgccgcccggacttggtggtggccttcttcggccgcctcctcaggttggggctgcgcttggaggtcatctccttcagcaatctcctcaaggggctctgccaggccaagcgtacaaatgaggcggtggacttgctgctccaccggacacctgaactggactgtgtgcctgatgtcgtctcgtacaacatagtaatcaacggctgtttaaaagaaggtgaagtagacaaagcgtgcaatctcttccatgagatgccccaactgggagttcaacctgatgtggtgacctacaactcaattattgacgcactaagcaaatccagagcaatggacaaggcagaagtagtccttcggcaaatggttgatcaaggcattggacccgatgtcatgacatatactagtctgatccatggatattccacttcaggtcagtggaaggaggcagttaggttattcaagaaaatgacaagtcttggtgctctaccataccgtcatgtg

SEQ ID NO: 2704 - DNA, 990 bp, Triticum aestivum
atgcccgacgacctgcctaatgccatctcctactcagtaattctcaagagtttctgcgacagtgggaggagccagcttgcgcttgacctgctccaaatgatggccaaaaaaggagctgaccactcccccgacgtggttgcatacaacatggtaatcgatggcttctttaaggagggcgaagtaagcaaagcatgcgatctgttccatgaaatgatacaacagggggttgtgcctactgtggtgacgtataactctgttatcgatgcgctatgcaaagcaagagcaatggacaaggcggaggtggttcttcgatcaatggttcataacggtgtacacccgaatactgtgacatataatagcttgatccaaggatattcaactttgggacagttgaaagaagtcgctaggttgttgaaagtgatgagaagccaaggtgttatgccaagcgttgttacctacaactcactcatggactacctttgcaagcatggaagaatcaaagaagctgaggaaatattttattccatggccgtgaatggccgaagaccagatatagtctcatactctattatgctccatgggtacgctatagaaggatcccttgttgaaatgattgatctctgtgagctgatggcaagagatggagttgtacccgacctccgttgtttcaacatactgattaatgcatatgctaagtatggtaggatggatgtggccatgcttttctttgaagacatgttgaagcagggtgtgaagcctaatgaattcacttatttaactgtgatatctgcattttgcaagatgggcaggatggatgatgcgatggaaaaattcagtgagatgattgatatcggagtaccacttgacacagaagtttacatgtgcatggttgagggttattttaatcatggtgattccatgaaagccgaggaatttattaccagaatgaagaacaaggatattaatcataagccgtgggaaggtaatcga

SEQ ID NO: 2705 - DNA, 990 bp, Triticum aestivum; identical to SEQ ID NO: 2704

SEQ ID NO: 2706 - DNA, 990 bp, Triticum aestivum; identical to SEQ ID NO: 2704

SEQ ID NO: 2707 - DNA, 990 bp, Triticum aestivum; identical to SEQ ID NO: 2704

SEQ ID NO: 2708 - DNA, 750 bp, Triticum aestivum
atgccagccgcccgcctgtcctccatctccacctcctccttcagggctccttcacgagcccccctcgccgccttggctgccgccacggagcgtgtccgcgcgggaacgctgagccaggatgacgcgcaccacctgttcgaccaattgcttggccaagccgccgccgtcccggaacgcgggctcaacaactttcttgccgcactcgcccgtgctccaccctcagctgcctgccgcgatggccccggccttgccatcgccctcttcaaccgcatgtcccgaggcgctggtgcacgggtggcgtcgcccacgctctgtacctattccatcctcatggactgctgctgccgcgcaggccgcccggacttggtgcttgccttcttcggccgcctcctcaggttggggctgcgcttggatatcatctcctccagcaatctcctcaaggggctctgccaggccaagcgttcaaatgaggctttggacatgctgctccaccggatgcccgaactggactgtgtgcctgatgtcttctcgtacagcatagtaatcaacggctgttttaaacaaggtgaagtagacaaagcgtgcaatctcttccatcagatgccccaactgggagttcaacctaatgtggtgatctacaactcagttatcgacgcactaagcaaatccggagcaatggacaaggcagaagtggtccttggcaaatggttgatcaaggaattgaacccaatatcaagacatataactgtc

SEQ ID NO: 2709 - DNA, 750 bp, Triticum aestivum; identical to SEQ ID NO: 2708

SEQ ID NO: 2710 - DNA, 972 bp, Triticum aestivum
atgctacagaggggaatttcgccgaatgttgtgacctgcaattcaatcatctctggcatgtgcaaagttcatgcgatggacaaggcagaggaggttcttcaacagatgactgatagaggtattctgcctgatgttgccacatataccagtctcatacatggatattattcattaggacagtgcaaagaggtggatcggattttcaaggagatgactagaaatggtgtccaaccaaatgttgtaacttatagtatacagatggattatctttgcaagagcggaagatgcgcggaagctaggaagatctttgattctatggtcagtttgggccaaaaaccgtctgttactacctacagtattctgcttcatggttatgttatggaaaaatcatttcatgatatgcattgtctccttgattttatggtagaaaatggtatctcaccagatcatcatgtctacaacatactcatatctgcatatgctaaagaggaaatggcaagtgaggtaatgcatatatttacaaaaatgcggcagcaaggattgaaccctagtgttgcggactatggagcggtaataaacttgctttccagtattggcagaatggatgatgctatgtcccaattcaatcaaatgatagccgaaggattagctcctgatatcatagttttcaacccccttattagtggtttttgtacttgtggcaaatgggagaaggttcatgaactattttctgaaatgttgaatcgcggcacctatcatgataccgtgttcttcaccacaattatggaccgcctttgcaaaaatggaagggttatggaatcccaagatatgtttgacctgatggtacacgtgggtgttaagcctaatgttcatacttatgccacattgatgcatgggtactttttcgttaggaagatggatgaagtgaggaagttagttggcaatatgctctcaattggctcgaaaccggat

SEQ ID NO: 2711 - DNA, 846 bp, Triticum aestivum
atggccctgccctcgccacgcatggcccaagcaggtcgtcgccaggtgccagcaccctccatttacacctacaacatactaattgactgctgccaccgagcatgccggccggacctagggcctgccttcttcggtcgcctcctcaacacaggcatcacaatgagcgtcattacctacatcagcctattcaagtgcctctgtgacatgaagcgcacagaggaggctctgaacgtgctgctccatagaatgcccgacgacctgcctaatgtcatctcctactcagtgattctcaagagtttctgcgatagtgggaggagccagcttgcgcttgacctgctccaaatgatggccaaaaaaggtgctgaccactcccccgacgcgatgtcatacaacatcgtaatcgatggcttttttaaagagggtgaagtaagcaaagcatgcgatttgttccatgaaatgatgcagcagggggttgtgcccgatatggcaacgtacaactccgttatcgatgcgctatgcaaagcaagagcaatggacaaggcagaggtggttcttcgatcaatggttcataatggtgtccaaccagatgttgtgacatataatagcttgatccaaggatattcaactttgggacagttgaaagaagtcgctaggttgttgaaagtgatgagaagccaaggtgttatgccaagtgttgttacctacaactcactcatggactacctttgcaagcatggaagaatcaaagaagctgaggaaatacttgattccatggccgtgaatggccgaaaaccagatctcatactctattatgctccatgggtacgctatagaaggatcccttgt

SEQ ID NO: 2712 - DNA, 846 bp, Triticum aestivum; identical to SEQ ID NO: 2711

SEQ ID NO: 2713 - DNA, 846 bp, Triticum aestivum; identical to SEQ ID NO: 2711

SEQ ID NO: 2714 - DNA, 846 bp, Triticum aestivum; identical to SEQ ID NO: 2711

SEQ ID NO: 2715 - DNA, 846 bp, Triticum aestivum; identical to SEQ ID NO: 2711

SEQ ID NO: 2716 - DNA, 846 bp, Triticum aestivum; identical to SEQ ID NO: 2711

SEQ ID NO: 2717 - DNA, 762 bp, Triticum aestivum
atgccccgtctccgcctccgtcgcttctccaccgcgccgatgttccacctcctccgccgcagctcctcctccaccaccacctcgccgccctcgcgttcctggtctccccacgccgcctttgccgccgccacggagcgcatcagcgccgggacgctcagccgggaagacgcgcaccgcctgttcgacgaattgctacggcaggccaccccggtccccagccgctccctaaacggcttcctcgccgccctcgcgcgtgctacgtcctctgccgcctgcatcagagatggtcgcgccctcgccatcgccctcttcaaccgcgtgtgtcgagagcaatccggcccgcgggtggtgcctctcacagtccacacgtacaacatcctcatggactgctgctgccgcgcgtctcgcccggacctaggtcttgccttcttcgctcgcctcctcaggacaggcctgaagacaaacgagatcaccgccaacaccttcctcaagtgcctctgctacgcaaaacggacggatgaggctctgaacgtgctgcttcataggatgtccgagctcggctgtgtgcctgatgccatctcatacaacattgttctgaagagcttatgtgaagatagcatgagtcagcgggcgctcgacctcctccagatgatggcgaaagaaggaggtggctgctcccccaacgtggtggcgtataacacggtcatccatggcttttttaaggaaggtgaaacaggcaaggatgcaatctgttccatgaaa

SEQ ID NO: 2718 - DNA, 762 bp, Triticum aestivum; identical to SEQ ID NO: 2717

SEQ ID NO: 2719 - DNA, 762 bp, Triticum aestivum; identical to SEQ ID NO: 2717

SEQ ID NO: 2720 - DNA, 975 bp, Triticum aestivum
atgcggcagcaaggattgaaccctaatgttgtgaactatggagcggtaataaacttgctttctagtattggccgaatggatgatgctatgtcccaattcaatcaaatgataactgaagggttagctcctgatatcatagttttcaactcccttattagtggtttctgttcttgtggcaaatgggagaaggttcatgaactattttctgagatgttggatcgtggcatctgtcccgacagagtgttcttcaacactgttatggatcacctttgcaaaaatggaagggttatggaagcccaagatgtgttcgacctgatggtacacatgggtgtgaagccttttgtccgtgattacaacacactgattcatggatactgtttagttggtaagatggatgaagggaggaagttacttgataatatgttctcaattggcttgaaaccgggtgatttcacctatagcatactgattgatggttactctaagaagggaaggatagatgatgcattgattattgtcagggtaatgttggacgggaaggttaagccttctattatcacttttaatattatgattggtgcgttgcttaaaggtggcagaaaggaagaagccaaagatttgtttaatggtatctgggccaaaggattagtgcccgatgttgttacatatagcttaatgatacaaaaacttatagaagaaggttctctacaagagtctgatgatctattcctttctatggagaagaatggatgtgctgccgactcccgcatgctaaatgctatagttagaagcttacttcagaaaggggacgtgcccagggctgggacttatctgtctaaaattgatgagaggagcttcacccttgaaggttccacagctagcttgttgactgcacttgcttcagggaggaaaggccaggaatataaggggttactccccgaaaaataccactattttctggaacagggcactgat

SEQ ID NO: 2721 - DNA, 957 bp, Triticum aestivum
atgcctcgcttctcctccaccacgtcaatgtcgccactgcgcctccgcctccgcctccacgcccgccactcctccgcctctcaaccctcacgcagccagggctgggatccccacgccgccttcgccgccgcgacgcagcgtgcgcgctctggcagcctcacaccggcggacgcacaccacctgttcgacgaattgctgcggcaggccaatcctgtccaggagcgccccctcaacaaccttctcgccgccatcgtccgcgctccggcgtccaacgcctgcagaaacggccctgcactcgcggtcgccctcttcagtcgcatatcccaaggcgcccgccgacgggtggcgcagccaaatgtcttcacctatggcgtcctcatggactgttgctgtcgtgcgcgccgcctggatctagcaatcgccttcttcggccgtctcctcaagacgggcctggaggcagacctagtctttttcagcaccctcctcaagggactctgccacgcaaagcgctcagatgaagctctggacgtgctgctgcacaggatgcctgagctgggctgcacccccgacgtggtggtgtataacaccgtcatccatggattctttagggaaggccaagtaggcaaggcgtgcgatatgttccatggaatggcgcagcagggcgttgcgcctaatgtggtgacatataactcggttattgatgcgctgtgcaaggccagagcaatggacaaggccgagtatttccttcgtcaaatggttgataatggtgtcgtacctgataatgtgacttataatagcctcatccatggatactcctcttcaggccatcaaaaggagacgcttagggtgctgaaagaaatgacaagtcagggtattataccagatgttgttacttgcaactcgctcatggcctacctttgcaagaacggaagaagcaaagaagctgcagaatttttt

SEQ ID NO: 2722 - DNA, 963 bp, Triticum aestivum
atgccccgtcgtctcccactcgccttgctcccacttcacaccaaggccatgcctcgcctctcctccaccacgcccatgtcgccactccgcctccgcctccgcgcccgccactcctcctccacctcccattcctcacgcagctgggagccccacaccgccttcgccgccgccacggagcgtgcgcgctctggcaacctcaccccggaggacgcacaccacctgttcgatgaattgctgcggcaggccaatcctgtccaggagcgcccgctcaacaaccttcttgccgccctcgcccgcgctccggcgtccgcggcgtgcagtgatggccttgcactcgcagtcaacctcttcagccgcatatcccaaggcgcccgctgtgtggcgcacccaacggcctgcacctacggcatcctcatggactgttgctgccgcgcacaccgcctcgatctggcgtttgctttcttcggccgtctcctcaggacgggacttaaggcaggcgtcattcaagtttgcactcttctcaagggcctctgccacgcaaagcgcacagatgaggctctcaacgtgctgcttcacaggatgactgagctgggctgcacccctgacgtggtggcgtataacacggtcatccatggcttcttcaaggaaggccaagtaggcaaggcgtgcagcctgttccatgaaatggcgcagcagggcgttgcgcctaatttgatgacatatacctcggttattgatgcgctgtgcaaggccaaagcaatggacaaggcagagtatttccttcgtcagatggttgataatggtgtcgtacctgataatgtcacatataatagcctcatccatggatattcctcttcaggccattggaaggaggcagttagggtatccaaagagatgacaagtcggagggttacagcagatgtgcatacttacaacatgtttatgacctttctttgcaaacat

SEQ ID NO: 2723 - DNA, 963 bp, Triticum aestivum; identical to SEQ ID NO: 2722

SEQ ID NO: 2724 - DNA, 963 bp, Triticum aestivum; identical to SEQ ID NO: 2722

SEQ ID NO: 2725 - DNA, 963 bp, Triticum aestivum; identical to SEQ ID NO: 2722

SEQ ID NO: 2726 - DNA, 963 bp, Triticum aestivum; identical to SEQ ID NO: 2722

SEQ ID NO: 2727 - DNA, 963 bp, Triticum aestivum; identical to SEQ ID NO: 2722

SEQ ID NO: 2728 - DNA, 636 bp, Triticum aestivum
atggacagctgctgccgtgcacgtcgcccggacctaggccttgccttcttcggccgcttcctcaggacgggcctcaaggcagacctgatcgtcgccagcaccctcctcaagtgcctctgccatgtaagacggacaaatgaggctgtcaacatgctgcttcataggatgtccgagttcggttgtgtgcctgatgccatctcatactccatagtacttaagagcttatgtgacaatagcaggagccagcaagcgctcgacctgctccagatggtgaggaaagaacgaggtgccagctccctcaatgtggtggcatatagcataatcatacacggcttctttaaggaaggggaagtaagcaaggcatgcgatctgttccatgagatgatgcagcaagggattgtgcctgatgtggtgaaatataggtcggttattgatgccttgtgcaaggtcagggcaatggacaaggcaaagctggtccttcagcagatggttaataatggcgttcgaccaaatatgtatacttggaactcatttatgtactccctatgcaagcatggaagaagcaaagaagctgcagaattttttgactccatggtagaaacagctagggttctaccaggcctagggcgtagttta

SEQ ID NO: 2729 - DNA, 933 bp, Triticum aestivum
atgaagttcagtgcagttccaagtttggttgagtgtctgacctccgccggtcatccagtctccagtggtttgtcgtcgccgacacgctcccacattcgccactgcaggaaggagcaagacctcccacgtctgacccggtcgtcctccagctccggctcctcacgggtcaaccagctgctaaacaaactcaaggattatcttggctctgggacgctcaggccggagctcgcgcaccaactgttcgtcgaattgtttcgtcaaaccgttccggtatcagcagacgcactcaatgtcttattttctgccctcgcgtgtgggctgccctctgccgcctgcaatgatggtcctgccctcgcaatcgccctcttcaaacacatggcacgagcaagatgccgccaggtgatggcacccaccaatcacacttacaacacactaattgagtgctgccacatggcacgccgccctgacatagggctcgtcttctttggcctcctcctcaagataggcatcacggcagatgtcttcaccttcaacagcttattgaagtgcctctgtgacatgaagcaaacagatgaggctctaggcgtgctgctccacaggatgcccggcgacatgcctgatgtcatctcctactcagtaattatcaagagcttctgtgacaacgggaggagccaccgtgcacttgacctgctccggatgatgaccaaaaagggatatgaccactcccccaatgtggtttcatacacaataatcattgatggattaattaaggagggtgaactaagcaaagcatgtgctctattccatgaaatgatgcagcagggggttgtgcctgatgtggtgacgtatagctccattatcgatgggttgtgcaaagcaagagcattggacgaggcagaggtggtccttcgacaaatgattgatagcggtgtt

SEQ ID NO: 2730 - DNA, 933 bp, Triticum aestivum; identical to SEQ ID NO: 2729

SEQ ID NO: 2731 - DNA, 933 bp, Triticum aestivum; identical to SEQ ID NO: 2729

SEQ ID NO: 2732 - DNA, 933 bp, Triticum aestivum; identical to SEQ ID NO: 2729

SEQ ID NO: 2733 - DNA, 933 bp, Triticum aestivum; identical to SEQ ID NO: 2729

SEQ ID NO: 2734 - DNA, 933 bp, Triticum aestivum; identical to SEQ ID NO: 2729

SEQ ID NO: 2735 - DNA, 804 bp, Triticum aestivum
atgcgcccatgccggacgcctctcctcgactccacctcgccgctgtccgtgctcctactcgaccacctccaccgcaatcgcccctcccctcccccctcagcctcgccgccgtcagccatctggtctcccatcgccgcattcgccgctgccacgaagcgcgcccgagccgggacgctcagccctgaggacgcacaccacctgttcgacgaattgctacgccagtccatcccggtccccaaccgcttcctgaacggcttccttgccgccctcgcccgtgccccagtctccgaagcctgcggagatggccccgccctcaccgtcgccctcttcaaccgcctctgccgagaagaagccggcccttgtgtagagccgcccacttactatacctacagcattctaatggacagctgctgccgcgtgggtcgccccgaccttgggcttgctttcttcggccgcctactcaagtcaggcctcaaggcagaccagatcaccgccagcagcctcctcatgtgcctctgcgatgcaggacggacaaacgaggctgtggacgtgctgcttcataggatctccgagctcggctgtgagcctaatgtcatcccatacaacatagttcttaagagcttatgtgacagtagcaggagccagcgagctcttgacctgctccagatgatggcacaaagagcttgctgctcccctaatgtggtgtcatataacaccgtcattcagggcttatttaaggaaggccaagtaagcatggcgcgcacattcttcttctatgaaatgatggggttatgcctaatgtgg

SEQ ID NO: 2736 - DNA, 804 bp, Triticum aestivum; identical to SEQ ID NO: 2735

SEQ ID NO: 2737 - DNA, 804 bp, Triticum aestivum; identical to SEQ ID NO: 2735

SEQ ID NO: 2738 - DNA, 804 bp, Triticum aestivum; identical to SEQ ID NO: 2735

SEQ ID NO: 2739 - DNA, 804 bp, Triticum aestivum; identical to SEQ ID NO: 2735

SEQ ID NO: 2740 - DNA, 804 bp, Triticum aestivum; identical to SEQ ID NO: 2735

SEQ ID NO: 2741 - DNA, 963 bp, Triticum aestivum
atggattatctttgcaagagtagaagatgtgcggaagctaggacgatttttgattctatggccggaaaggaccaaaaaccgaacgttactagctacagtattctgcttcatgcgtatgctatggaacagtcatttcatgatatgcattgtctcattgaattgatggtagaaaatggtgttgcaccaaatcattctgtgtacaacatactgatagacgcatatgctaaggggaaaatggttgatgatgtaatgcacatatttacaaaaatgcggcagcaaggattgaacccaaatgctgtgaactatggaacagtaataaacttactctgcagtattggccgaatggatgatgctatgttgcaattcaatcaaatgataactgaagaattagttcctgatatcatagttttcaacactcttataagtggttttttttcttgtggaaaatgggagaaggttcatgaactacttgctgaaatgttgaatcgtggcatctatcccgacaacgtgttcttcaacacaattatggatcacctttgcaaaaatggaagggttatggaatcccaagatctcgctgacctgatgatacacatgggtttgaagcctgacgtgcatacttataacacactgatgggtggatactttttcattggtaagatggatgaagtgaggaagttacttgaccatatggtctcaattggcatggaaccggatgttgtcacctataacacactgattgatggttactttaagaatggaatgatagatgatgcgttagctgttttcagtgaaatgttggacaagaaagttaagccttgcgttatcacttataacacagtgctgcatgggttatttcatactggaaggactgttgctgcaaatgaactctatctcaggatgattgacagcggaatatgtgtggacattgtgacctacaacaactccgcctatgttgtctcaaca

SEQ ID NO: 2742 - DNA, 963 bp, Triticum aestivum; identical to SEQ ID NO: 2741

SEQ ID NO: 2743 - DNA, 963 bp, Triticum aestivum; identical to SEQ ID NO: 2741

SEQ ID NO: 2744 - DNA, 963 bp, Triticum aestivum; identical to SEQ ID NO: 2741

SEQ ID NO: 2745 - DNA, 963 bp, Triticum aestivum; identical to SEQ ID NO: 2741

SEQ ID NO: 2746 - DNA, 963 bp, Triticum aestivum; identical to SEQ ID NO: 2741

SEQ ID NO: 2747 - DNA, 909 bp, Triticum aestivum
atgctccgccgcatccgcatccgcatccgcctccgtcgccgcccctacccctcctgcacctacccggagcccgtcctctgccactcctccagctttatctctgcggctcccctcctccgcctccaccagtaccgcaccaccaccacgccgatgtcccgcatccacctccgccgtcgcctcttctcctccaccacgcggccctcgcactcctggtctccacatgccgcctttgccgcagcaacaaagcgcgtacgcaccggggcgctcagccaagacgatgcacaccacctgttcgacgaattgctgcggcaggccaccccggtccccgggcgctccctcaacggcttccttgccgccctcgcccgtgcgcccgcctccggagcctgcagagatgggcccgccctcgccctcgctctcttcaaccgcgtctgccgggatgaatccggcgcgcgggtggcaccgcccacaatcttcacctacggcatcctcatgaactgctgctgccgcgcgcatcgcccggacctagggctcgccttcttggctcgcctcctcaggacgggcctgaaggctgaccagatcaccgccaccaccttcctcaagtgcctctgctacgcaaaacggacggatgaggctgtgaacgtgctgcttcataggatgcccgagctcggctgtgtgcctgacgccttcgcatactccactgttctgaagagcttatgcgacaatagcatgagtcagcgggggctcgacctgctccatatgatggcgaaagaaggaggtggctgctcccccaacgtggtggcgtgtagcaccgtcatccatggcttctttaaggaaggtgaaacaggcaaggcatgcaatctgttccatgaaatgatgcagcaaggtgttgagcccaatgtgtggacatac

SEQ ID NO: 2748 - DNA, 909 bp, Triticum aestivum; identical to SEQ ID NO: 2747

SEQ ID NO: 2749 - DNA, 909 bp, Triticum aestivum; identical to SEQ ID NO: 2747

SEQ ID NO: 2750 - DNA, 861 bp, Triticum aestivum
atgttggatcgcggcatctgtccagacacagtgttcttcaacactgttatggatcacctttgcaaaaatggaagggttatggaagcccaagatgtgttcgacctgatggtacacatgggtgtgaagccttttgtctatgattacaacacactgatacatggatactgtttagtttgtaagatggatgaagagaggaagttacttgacaatatgttctcaattggcttgaaacctgatgatttcacctatagcatactgattgatgattactctaagaagggaaggatagatgacgcattgattattgtcagggaaatgttggacgggaaggttaagccttctattatcacttttaatattatgattggtgtgttgcttaaaggtggcataaaggaagaagccaaagatttgtttgatggtgtctgggccaaaggattagtgcctgacgttgttacatatagattaatgatacaaaagcttatagaagaaggttctctacaagagtctgatgatctattcctttctatggagaagaatggatgtgttgccgactcccatatgctaaatgctacagttagaagcttacttcagaaaggggaggtgcccatggctgggacttatctgtctaaaattgatgagaggaggttcacctttgaagctcccactgctagcttattgactgcacttgcgtcagggggaaaggccaggaatataaggagttactccctgaaaaataccactcttttctggaacagggcactggttgaaaccatttctagagattttgcctacatattctggactgctattcgaggcctgaacttttctttgtgggttacatctcccaaccttttattttcg

SEQ ID NO: 2751 - DNA, 861 bp, Triticum aestivum; identical to SEQ ID NO: 2750

SEQ ID NO: 2752 - DNA, 861 bp, Triticum aestivum; identical to SEQ ID NO: 2750

SEQ ID NO: 2753 - DNA, 879 bp, Triticum aestivum
atgtttgacttcattgtaggtattggtcagcggcctgatgtgattatgtacaattcactgatggatggatattgccttgttggcaaagtggaggaagcactgagagtacttgatgctatgaagtctgctggcctccaacctgatgcttttacatacggtatacttcttaatggctactgtaaaattggaaggatcgccgctggattgagtcttttcatggaaatgtcactcagcagggttaagcccacgactattatgtacaacattatacttgatgggctgtttcgctccgggagaacagtttctgcaaaggaaaaattccgtacgatgagcgaaagtggcataccagtgggcattgacacatacaacatagttcttaatggactttgcaaaaacaattgcactgatgaagcaatagagctgttcaagaaattacgtgcaacgaacgtgaagattgatgtcataacattcagtaccatgatttctgcaatgtttaaaactaggagaattgaagaggccaaggatttgtttgctactatatcagccattgggttggtgccttctgttgtgacttacagtttaatgatgacgaatttcataaaagaagggttgctggcagatgctgatgatatgtttttagcaatggagaaggctggctgtgctcctgactccaggctgctaaatcaagtggtcagggtatttctgaagaatggtgaagttgtaaaggctgtgacttatctcgctaaacttgatgctaaacagctgtcagttgaagcttcaacgatttcgttaatagtatctctcttctcaaggaaagggaaattaagggagcacgtaaaattgcttccggtaaagtaccagcctcctgagatgttgggc

SEQ ID NO: 2754 - DNA, 879 bp, Triticum aestivum; identical to SEQ ID NO: 2753

SEQ ID NO: 2755 - DNA, 879 bp, Triticum aestivum; identical to SEQ ID NO: 2753

SEQ ID NO: 2756 - DNA, 879 bp, Triticum aestivum; identical to SEQ ID NO: 2753

SEQ ID NO: 2757 - DNA, 879 bp, Triticum aestivum; identical to SEQ ID NO: 2753

SEQ ID NO: 2758 - DNA, 879 bp, Triticum aestivum; identical to SEQ ID NO: 2753

SEQ ID NO: 2759 - DNA, 852 bp, Triticum aestivum
atgcatggtgatctggtgaaagtgaaggagttgatttttgaaatgacggacaaaggtattcctcaccctaacattgtcttcttcagttcaataatgcatagtctgtgcaacgaaggaagggttatggatgcacaccatatctttgacttggttatagacattggtgagagacctgatctcattacatttaatacgctaattgacagatattgcttagtcagcaagatggaggaagcactccgactacttgattccatggtatcagctggcattaagccaaatgtgattacatataatacacttattaatggctataggagtggaaggctcgatgatggcgttattctatttagagaaatgttgcataccagagttaaacctaacactgttacatataacatcatactggatgggttatttcgtgctggaagaactgtttctgcgaagaagatgttccatgagatgatcgaaactggaacagcagtgagcatttccacatacagcatagttcttggaggactttgtaggaataactgcaccgatgaagcaatcgcttttttccaaaaattagttgcaatgaatgtgatgttcaatattgcgatactcaataccataattaaggcaatgtacacggttcagagaagagaagaagctaacgatttgtttgcttcattaccagcctatggactagtgcctaatgctgctacttacggagtaatgataagcaatcttctgaaagaaggatcgttggaagaagctgacaatatgttttcatcaatggagaagcgtggttgtgctccaagctctcgtcttgtaatgatatcatcagaaaattattggaaaagggggaga

SEQ ID NO: 2760 - DNA, 867 bp, Triticum aestivum
atgcctcgcctctcctccaccacgaccacgcccatgtcgcctctccgcctccgcctccgcctccgcgcccgccactccgcctcaacctcccattcctcacgcagctgggagccccacgccgccttcgccgccgccgcggagcgtgcgcgctctggcaacctcaccccggaggacgcacacgacctgttcgacgaattgctcaggcagggcaatcctgtccaggagcgccccttgaacaaactcctctccgccctcgcccgtgctccggcgtccgcggcctgcagaaacggccctgcactcgcggtcaacctcttcagccgcatatcccaaggcgcccgcctacgggtggcgcagcctacagcctgcacctacggcgtcctcatggactgctgctgccgcgcacaccgcctggatctgacgctggccttcttcggcggtctccttaggacgggcctggaggcagaccaagtcatcttctgcaccctcctcaagggactctgccacgcaaagtgcacagatgaggctctcaacgtgctgcttcacaggatgcctgagctgggctgcacccccaatgtggtggcgtataacaccgtcatccatggcttctttagggaaggccaagtaggcaaggcgtgcaatctattccatgaaatgaggcagcagggcgttacacctgatgttgtgacatataactcggttattgatgtgttgtgcatgttggttgatctcggctctgaccgggtaaaaagtaacgttaaggggatgagccaggaaccaacgttcgtggcttttgaccccaacagaattgccctgatcgggggcacctctaaccgacagatggttttggtcccctattgccagcgcata

SEQ ID NO: 2761 - DNA, 867 bp, Triticum aestivum; identical to SEQ ID NO: 2760

SEQ ID NO: 2762 - DNA, 900 bp, Triticum aestivum
atgcctaatgtggtgacatatagcttgatggttggtgggttgtgcaaggtcggggcaagggacaaggcaaagctggtccttcggcatatggttggtaatagtgttcgaccagatatgtatacttggaactcattcatgggatctcttcgcaagcagggaagaagcaaggaagctacacaactttttgattacatggccgccaagggccacaaacctgatgttgtcatgtactctactctgcttcatgggtatgctactgaaggatgcttcactgatatgattaatcgctttaattcaatggaaggcaacggtattgtagctaacagccgtgtttttaacatactaatcgacgcatatgctaaacgtggaatgatgcatgaagctatgctcatatttactgaaatgcgggaacaaagagtgagtcctgatacattcacctatggaattataatagctgcactttgcagaatgggtaggctatctgatgctatggagaaattaaatgaaatggttgctacaggattacagccggacgaggctgtttactattccctaattcagggtttttgtacacatgatgatttggtcaaagctaaggagttggtttctgagatgatgaccaaaggtattcctcgtcctaacattgtgttcttcaactcggtaatagccaggctgtgcaaagaaggaagggttaaggatgcacacggtatctttgacttggctatgaacattggtgagaggcccaacgttattacatttaattcactgattcacggctatagcttggttggcaagatggcgaaagctttcggggtacttgatgacatggaatcagttggcattgagcccgatgttgttacttatactacacttcgtcatggctattctagaaatagaagg

SEQ ID NO: 2763 - DNA, 900 bp, Triticum aestivum; identical to SEQ ID NO: 2762

SEQ ID NO: 2764 - DNA, 900 bp, Triticum aestivum; identical to SEQ ID NO: 2762

SEQ ID NO: 2765 - DNA, 900 bp, Triticum aestivum; identical to SEQ ID NO: 2762

SEQ ID NO: 2766 - DNA, 900 bp, Triticum aestivum; identical to SEQ ID NO: 2762

SEQ ID NO: 2767 - DNA, 900 bp, Triticum aestivum; identical to SEQ ID NO: 2762

SEQ ID NO: 2768 - DNA, 891 bp, Triticum aestivum
atgatggttgaggatggaggtagctgccaacctagtgtggtgttctataacatcatagtttatgtcctgttgaaagagggtgcgatgggcaaggcttacaacctattttgtgaaatgctacagacggggatttcgccggatgttgtgacctataactcaatcatctatggcatgtgcaaggttcatgcgatggacatggctgaggaggttcttcaacagatgtttgatagaggtattcttccaaattatagaacatataatagtctaatacatggatattattctttaggacagtgcggagaggtggatcaggttttgagggaaatgtttggaaatggtgttcaaccaaatgtcgtaacttacagtgtacaaacggattatctttgcaagagtggaagatgcacagaagctaggaagatttttgattctatgaccggtttgggccaaaaaccaactgttactaactacaacattttgcttcatgggtatgctatggaacgatcatttcatgatatgcattgtctcattgatttgatggtagaaaatggtattgtaccacatcaccatatctaccacatactgatatttgcatgttctaaagaaaaaatggttgatgaagcaatgcatatatttaaaaaaatgcggcagcaaggattgaaccctaatgcagcgagctatggaacggtaataaacttgctttgcaacattggccgaatggatgatatgatgttacaattcaatcaaatgataacggaaggattagctcctgatatcatagttttcaacacccttttgattggtttttgttcttgtggcaaatgggagaaggtttatgaactattttctgaaatgttgaatcgtggcatctatccagtaatgtgttcttcaaga

SEQ ID NO: 2769 - DNA, 864 bp, Triticum aestivum
atgatggatgaagctatgctcatattttctggaatgtgcggacaaggagtgactccagagtctagaatggctaggctggctgatgctttgaataagttcagtcagatgatttcaactgatatacaaccgaacacagttgtttatcactccctaattcagggtttctgtgcatatggcgattcggtgaaagcaaaggagttggtttatgaaatgataaacaatggttttcctcgtcctaacattgtgttcttcagttcaataataaatagtctatgcaaagaaggaaaggttatagatgcacaagatatcttcaacttggttgtagaaataggtgagagtcctgatgtcactatatttacttcactaattgaaggattttgcctagtcggcaaaatggagaaagcatcccaagtgtttgattccatggtatcagttggcattgagcctaatattgttacatatggtacacttgttgatggctattgtagaagtggaaggatagatgatgggttgattctattcagagatttgcttcacaagggagttaaacctacaacaattacatattacatcatactggatgggttatttcttgctgggagaacagttgctgccaagaaaatgttccatgagatgatcggaagtggaacacccgtgagcctgcacacatatgatataattcttggaggtctttgtaggaataattgtgctgacgaagcgattaccctgttccagaaattagtagcgatgaatgtgaagttggatattacaatacacaataccatgatcaatgcaatgttcaaagttcagagaagagaaaaagctaacgatttttgctgcagtatcagccagtggattggtacc

SEQ ID NO: 2770 - DNA, 732 bp, Triticum aestivum
atgatggatgaagctatgctcatattttctggaatgtgcggacaaggagtgactccagagtctagaatggctaggctggctgatgcttcgaataagttcagtcagatgatttcaactgatatacaaccgaacacagttgtttatcactccctaattcagggtttctgtgcatatggcgattcggtgaaagcaaaggagttggtttatgaaatgataaacaatggttttcctcgtcctaacattgtgttcttcagttcaataataaatagtctatgcaaagaaggaaaggttatagatgcacaagatatcttcaacttggttgtagaaataggtgagagtactgatgtcactatatttacttcactaattaaaggatattgcctagtcggcaaaatggagaaagcatcccgagtgtttgattccatggtatcagttggcattgagcctaatattgttacatatggtacacttgttgatggctattgtagaagtggaaggatagatgatgggttgattctattcagagatttgcttcacaagggagttaaacctacaacaattacatattacatcatactggatgggttatttcatgctgggagaatagttgctgccaagaaaatgttccatgagatgatcggaagtggaacacccgtgagcctgcacacatatgatataattcttggaggtctttgtaggaataattgtgctgacgaagcgattaccctgttc

SEQ ID NO: 2771 - DNA, 864 bp, Triticum aestivum; identical to SEQ ID NO: 2769

SEQ ID NO: 2772 - DNA, 864 bp, Triticum aestivum; identical to SEQ ID NO: 2769

SEQ ID NO: 2773 - DNA, 732 bp, Triticum aestivum; identical to SEQ ID NO: 2770

SEQ ID NO: 2774 - DNA, 864 bp, Triticum aestivum; identical to SEQ ID NO: 2769

SEQ ID NO: 2775 - DNA, 876 bp, Triticum aestivum
atgtcgcgcctccatccccgctacttctccagctccgtctcctcactcgccgacgagctgctgagcgaattccagcatcatctgggctcagggacgctcagtccgcagctcgcacaccaactgttcgacggattgctgcgccaaccagtcccagtatcagcgcgtgcactcaatggcttatttgctgccctcgcgcgtacgccgccctccaccacctgcgcagatggccctgcccgcgccatcgatctcttcaaccgcatggcccgagcaggccgccgccgcagggtgatagcacccaccagtcacacctacagcatactaattgaatgctgctgccttgcacgccgtccggaccttgggccttccttcttcgctcacctcctcaagacaggcgtcacggcagacgtcgtcatcttcagtggcttattcaagtgcctttgtgacatgaagcgcacggaggaggctctggatgtgctgcttcatagggtgcctcacgacctgcctaatgtcatctcctactcagtaattgtcaagagcctctgcgacaatgggaggagccagcttgcgcttgacctgctccatataatggccaaaaaaggtgctgaccactcccctaacgtggtgtcatacaacatggtaatcgatggcttttttaaggagggtgaaacaagcaaagcatgcgatctgctccaggaaatgattcagcagggggttgtgcccgatgtggtgatgtatagctccattatcgatgcactgtgcaaagcaagagcaatggacaaggcagaggtggtccttcgacaaatggttcatgatggtgatgtgacagcggcccgatctttcgatgagagtggggataattatcgatttggtggattt

SEQ ID NO: 2776 - DNA, 702 bp, Triticum aestivum
atggataaggcagagctgatccttcgacatatggttcatagtggtgtccaaccacatgataggatatataataccctgatccatgggtttttaactttgggtcagcagaaagaagcctttaggttgttggaactgatgacaagccaaggtgttatgccaaatgttgtgacttgcaactcagtcatggactacctttgcaagcatggaagagtcaaagaagctgcagaaatattttattccatggttgtgaagggccaaaaacctaatgtcatctcatactctgttatgctccacgggtatgctaaagaaggatcccttgttgctatgattgatctctgtgagctgatggcaagagatggagttgttcccgaccgctcttttttcaacatactgattaaggcatatgctaaatatggaatgatcgatgtggctatgcttttctttgatgaaatgttgaagcagggggtgaaccctaatgatatcacatatttaactctgatatctgcattttgcaagatgggcagaatggatgatgctatgatcaaattcaatgagatgattgatatgggaataccacatgatacaactgtttacatgtgcatgattgagggctatttgaatcatggtgattccgtcaaagccaaggaattcattactaaaatgaagagcagggatgtttgtcatagcccacggaagggtaat

SEQ ID NO: 2777 - DNA, 840 bp, Triticum aestivum
atggtaatggatggcttttttaaggagggtgaagtaagcaaagcatgtgatctattccacgaaatgatacagcagggggttgtgcctactgaggtgacatatagctccattatcaatgcgctatgcaaagcaagagcaatggataaggcagagctgatccttcgacatatggttcatagtggtgtccaaccacatgataggatatataataccctgatccatgggtttttaacttcgggtcagcagaaagaagcctttaggttgttgaaactgatgacaagccaaggtgttatgccaaacgttgtgacttgcaactcagtcatggactacctttgcaagcatggaagagtcaaagaagctgcagaaatattttattccatggttgtgaagggccaaaaacctaatgtcatctcatactctgttatgctccacgggtatgctaaagaaggatcccttgttgctatgattgatctctgtgagctgatggcaagagatggagttgttcccgaccgctcttttttcaacatactgattaaggcatatgctaaatatggaatgatcgatgtggctatgcttttctttgatgaaatgttgaagcagggggtgaaccctaatgatatcacatatttaactctgatatctgcattttgcaagatgggcagaatggatgatgctatgatcaaattcaatgagatgattgatatgggaataccacatgatacaactgtttacatgtgcatgattgagggctatttgaatcatggtgattccgtcaaagccaaggaattcattactaaaatgaagagcagggatgtttctcatagcccacggaagggtaat

SEQ ID NO: 2778 - DNA, 702 bp, Triticum aestivum; identical to SEQ ID NO: 2776

SEQ ID NO: 2779 - DNA, 702 bp, Triticum aestivum; identical to SEQ ID NO: 2776

SEQ ID NO: 2780 - DNA, 840 bp, Triticum aestivum; identical to SEQ ID NO: 2777

SEQ ID NO: 2781 - DNA, 702 bp, Triticum aestivum; identical to SEQ ID NO: 2776

SEQ ID NO: 2782 - DNA, 678 bp, Triticum aestivum
atgccgccttcgccactgccacagagcgtgtctgccggcacgctcagtccgaagcacgtgcaccacctgttcgacaaattgcttcggcaggccactccggtccccgagcgctccctgaacggcttccttgccgccctcgcgcacgcgccggactcctccgcgtgcaaagacggccccgccctcgtcctcgccatcttcaaccgcgtctcccgagaagaagccggcctgcgggtggccacgcccgccatctgcacctactgcatcctcatggactgctgctgccgcgcgcgtcgccgggacctagggcttgccttcttcggccgcctcatgaggacgggcctcaagacaaaccagatcgccgccaacaacctcctcaagtgcctctgccacgcaaaacggaccgacgaggctgtcagcgtgctgcttcataggatgtccgacctcggttgtgcgcctaactgcatctcatacaacacagttctaaagagcttgtgcgaagatagcaggagccagcaagcgctcgacctgctccagatgatggcaaaagaaggaggtgtctgctcccctagtctggtcaaatataacacggtcatccacggcttcttcaaggaaggacaagtaagcaaggcatgcaatctataccatgaaatgatgagcaaggggttgtgcctgatgtgg

SEQ ID NO: 2783 - DNA, 789 bp, Triticum aestivum
atgcctcgccgcctctactccaccaggcccatgtcctacacccgtctctgccgccggttgtcctcctcctccaccaccacctcttcgtcgtcaccctcctggtgtccccatgccgccttcgccactgccacagagcgtgtccgtgccggcacgctcagtccggagcacgtgcaccacctgttcgacaaattgcttcggcaggccactccggtccccgagcgctccctgaacggcttccttgccgccctcgcgcacgcgccggactcctccgcgtgcaaagacggccccgccctcgtcctcgccatcttcaaccgcgtctcccgagaagaagccggcctgcgggtggccacgcccgccatctgcacctactgcatcctcatggactgctgctgccgcgcgcgtcgccgggacctagggcttgccttcttcggccgcctcgtgaggacgggcctcaagacaaaccagatcgccgccaacaacctcctcaagtgcctctgccacgcaaaacggaccgacgaggctgtcagcgtgctgcttcataggatgtccgacctcggttgtgcgcctaactgcatcttatacaacacagttctaaagagcttgtgcgaagatagcaggagccagcaagcgctcgacctgctccagatgatggcaaaagaaggaggtgtctgctcccctagtctggtcaaatataacacggtcatccacggcttcttcaaggaaggacaagtaagcaaggcatgcaatctataccatgaaatgatgagcaaggggttgtgcctgatgtgg

SEQ ID NO: 2784 - DNA, 789 bp, Triticum aestivum; identical to SEQ ID NO: 2783

SEQ ID NO: 2785 - DNA, 678 bp, Triticum aestivum; identical to SEQ ID NO: 2782

SEQ ID NO: 2786 - DNA, 678 bp, Triticum aestivum; identical to SEQ ID NO: 2782

SEQ ID NO: 2787 - DNA, 552 bp, Triticum aestivum
atgtcccgcgtctgcctctgccgccgcctctcctccacctccacctccaacacgccaccctcaccttcctggtcaccccaggccgcctttgccgcggccacggagcgcgcccgcgccggaacgctcagccctcaagacgcacaccacctgttcgacgaattgtttcggcaggccacaccggttcccgagcgctcccttgatggattccttgccgccctcggccgtgctgcgtcctctgaagcctgcagagacggcccctccctcgccctcactctcttcaaccgtctctgccgagaagaagccggccggcgggtggcgccgcccacaatctacacctacggcatcctgatgaactgctgctgccgcgtgcgtcgtccagacctagggctcgccttcttcggccgcctcctaaggaccggcctcaaaacaaatgaggtcgtcgccagcaccctcctcaagtgcctctgctgtgcaaaacgggcagatgaagctgtgaacgtgctgcttcataggatgtccgtcgctgtgtgcctaattccttctcatacaaca

SEQ ID NO: 2788 - DNA, 840 bp, Triticum aestivum
atgatacacggatattccacgttgggccggtggaaagaaacgggcaaaatgttcagagaaatgacaagccggggtatcataccagatgttgttagttggacctcattcatgacctccctctgcaagcatggaagaagcagagaagctactggaattattgattacatgtctgccaagggccacaagcctaatattgtctcgtactctattctgtttcatggatatgctacagaaggatgctttgatgatatgattaatctccttgactcaatggcaaccaacggtattgttcccaatcgccagattttcagcattttagttgatgcgtatgctaaacgtggaatgatggatgaagctatgctcatatttactggaatgtgggaacaaggagtgatcccagatgtatccagatggggacaaggagtgagtccagagtctacaatttttaggctggctgatgctttgaacaagttcagtcagatgatttctattgatataaaaccggacacagttgtttatcactccctaattcagggtttctgcacacatggcgatttggtgaaagcaaaggagttggtttatgaaatgataaacaaatacattccacctcctaccgttgtgttcttcagttcaataataaatagtctatgcaaagaaggaagggttacagatgcacaagatatcttcaacttggttgttgaaataggtgagagtcctgatgtctttgcttttacttcactacttgacagatattgcctagtcggcaaaatggagaaagcatcacaagttttgatgcaatggtatcagctggcattgagcctaatgcatccacctaaagcg

SEQ ID NO: 2789 - DNA, 840 bp, Triticum aestivum; identical to SEQ ID NO: 2788

SEQ ID NO: 2790 - DNA, 840 bp, Triticum aestivum; identical to SEQ ID NO: 2788

SEQ ID NO: 2791 - DNA, 840 bp, Triticum aestivum; identical to SEQ ID NO: 2788

SEQ ID NO: 2792 - DNA, 786 bp, Triticum aestivum
atgctcaggccagagctcgcgcaccaactgttcgacgaaatgctgcgccaacctgtcccagtatcagctcgtgcactcagcggcttatttgctgcacttgcgcgtgcgccgccctcacctgtgtgcaccgatagccctgccctcgccattgatctcttcaacctcatggcccgagcaggccgtcgccaggcaacaacacccaccatttacacctacatcatactaatggagtgttgccaccgagcatgccgcccagacctagggattgccttcttcggccgcctcctcaagacaggcatcccgacaaacatcattacctacagcagcttgttcaagtgcctctgtgacatgaagcgcacagaggaggctctgaacgtgctgctccataagatgcccgacgacctgcctaatgtcatctcctactcagtgattctcaagagcttctgcgacaatgggaggatccagcttgcgcttgatctgctccagatgatggccaaaaaaggcgctgaccactcccccgacgtgatgtcatacaacatggtaattgatggcttctttaaggagggtgaagtaagcaaagcatgcaatctattccaagaaatgatacgacaggggattgtgcctactgaggtgacatatagctccattatcaatgcgctatgcaaagcaagagcaatggacaaggcagaggtggttcttcgatcaatggttcataatggtgcccaaccagatgttgtgacatataatagcttgatccaaggatattcaactttgggacagttgaaa

SEQ ID NO: 2793 - DNA, 747 bp, Triticum aestivum
atgctgcgccaacctgtcccagtatcagctcgtgcactcagcggcttatttgctgcacttgcgcgtgcgccgccctcacctgtgtgcaccgatagccctgcccttgccattgatctcttcaactgcatggcccgagcaggccgtcgccaggcaacagcacccaccatttacacctacatcatactaatggagtgttgccatcgagcatgtcgcccagacctagggcttgccttcttcggccgcctcctcaagacaggcatcccgacaaacatcattacctacaacagcttgttcaagtgcctctgtgacatgaagcgcacagaggaggctctgaacgtgctcctccataagatgcccgacgacctgcctaatgtcatctcctactcagtgattctcaagagcttctgcgacaatgggaggatccagcttgcgcttgatctgctccagatgatggccaaaaaaggcgctgaccactcccccgacgtgatgtcatacaacatggtaattgatggcttctttaatgagggtgaagtaagcaaagcatgcaatctattccaagaaatgatacgacaggggattgtgcctactgaggtgacatatagctccattatcaatgcgctatgcaaagcaagagcaatggacaaggcagaggtggttcttcgatcaatggttcataatggtgcccaaccagatgttgtgacatataatagcttgatccaaggatattcaactttgggacagttgaaa

SEQ ID NO: 2794 - DNA, 786 bp, Triticum aestivum; identical to SEQ ID NO: 2792

SEQ ID NO: 2795 - DNA, 786 bp, Triticum aestivum; identical to SEQ ID NO: 2792

SEQ ID NO: 2796 - DNA, 747 bp, Triticum aestivum; identical to SEQ ID NO: 2793

SEQ ID NO: 2797 - DNA, 786 bp, Triticum aestivum; identical to SEQ ID NO: 2792

SEQ ID NO: 2798 - DNA, 837 bp, Triticum aestivum
atggactgttgctgccgcgcgtgccgcccggatctggcgctcgctttcttcggccgtctcttcaggacgggcctggaggcaaaccaagtcatcttctgcaccctcctcaagggactctgccacgcaaagcgcacagatgaggctctggacgtgctgcttcacaggatgcctgagctgggctgcactcccgatgtggtggcatataacaccgtcatccatggcttctttagggaaggccaagtaggcaaggcgtgcgatctgttccatggaatggcacagcagggcgttatgcccgatgtggtgacatatagctcggttattgatgcgctgtgcaaggccagagcaatggacaaagcagagtatttccttcgtcagatgattggtaatggtgtcgtacctaataatgtggcatataatagcctcatccatggatattcctcttcaggccattggaaggaggcagttagggtattcaaagagatgacaagtcggagggttacagcagatgtgcatacttacaacatgtttatgacctttctttgcaaacatggaagaagcaaagaagctgcaggaatttttgataccatggctatgaagggcctgaaacctgacaacgtttcatatgctattctccttcatgggtatgccaccgaaggatgcttagttgatatgattaatctcttcaattcaatggaaagagactgtattctacttgactgttgtatcttcagcatactgattaatgcatatgctaaatctgggaagcttgataaggcaatgcttttatttaaagaaatgcagaaacaaggagtgaatctgcattcacatattcaaccg

SEQ ID NO: 2799 - DNA, 837 bp, Triticum aestivum; identical to SEQ ID NO: 2798

SEQ ID NO: 2800 - DNA, 837 bp, Triticum aestivum; identical to SEQ ID NO: 2798

SEQ ID NO: 2801 - DNA, 837 bp, Triticum aestivum; identical to SEQ ID NO: 2798

SEQ ID NO: 2802 - DNA, 837 bp, Triticum aestivum; identical to SEQ ID NO: 2798

SEQ ID NO: 2803 - DNA, 837 bp, Triticum aestivum; identical to SEQ ID NO: 2798

SEQ ID NO: 2804 - DNA, 822 bp, Triticum aestivum
atgaaacagcgggggttcgtgcctgatgtggggacatataattccattattgatgcaatgtgcaaagcaagagcaatggacaaggcaaaattggtccttcgacaaatggttgatagtggggttcgaccggatattgtgacatataataaactgattcatggatattccatttcgggccagtttgaagaggtcgttacgttgttggaaaaaatgagaagtcaaggtgtcaaaccaactgtttttacttgcaacacagtcatggactacctttgcaagcatggaagaatcaaagaagctgcagaatttttttattccatggttgagaagggccataaacctaatatagtctcatatgctattatgcttcatgggtacgctaaagaaggatcccttgttgaaatgactgatctctgtgagctgatggcaagagatggtattgtatcctatctccattgtttcaacatactgattaatgcatatgctaagtgtggaatgatggatgtggctattcttttcttcaaagacatgttgaagcagggagtgaaccctgatgaagtcacatatttagcagtgatagctgggtattgcagagtgggcatgatggatgatgctatggaaaaattcaatgagatgatcggtatgggagtaccacataatgcaactgtttacaggtgcatgattcagggttacttaaatcatggtgatttcttgaaagcaaaggaattgattactgaaatgaagaccaagggtatccatcctagactgtcgaaaagccaaggaattgatccagggtacctcatgagtcaactgtttccaggtgca

SEQ ID NO: 2805 - DNA, 822 bp, Triticum aestivum; identical to SEQ ID NO: 2804

SEQ ID NO: 2806 - DNA, 822 bp, Triticum aestivum; identical to SEQ ID NO: 2804

SEQ ID NO: 2807 - DNA, 822 bp, Triticum aestivum; identical to SEQ ID NO: 2804

SEQ ID NO: 2808 - DNA, 822 bp, Triticum aestivum; identical to SEQ ID NO: 2804

SEQ ID NO: 2809 - DNA, 822 bp, Triticum aestivum; identical to SEQ ID NO: 2804

SEQ ID NO: 2810 - DNA, 849 bp, Triticum aestivum
atgccttgtgcaaggtcagggcaatggacaaggcaaagctggtccttcagcagatggttgataatggtgttcgaccaaatatgtatacatgcatggaactcattcatgtactccctttgcaagaatggaggaagcaaagaagctgcagaattttttgactccatgacctccaagggcctcaaacctaatatcgtcgtgtactctactcttcttcacgggtatgctactgaaggatgcctagccgatatgattaatctctttaattcaatgaaagacaatgctattgtagccaactgcaatgttttcaacatattaattgatgcatatgctaaacgtggaatgatgcatgaagctatgctcatatttactgaaatgcaggaacaaagagtgagtcctaatgtattcacctatgcaattgtaacagctgcactttgcagaatgggcaggctgtctgatgcaatggacaaactaaatgagatgattgcaatgggattacaaccgaacaaggttgtttatcattctctaattcagggtttttgtacacatggtgatttggtgaaagcaaaggccttggtttctgaaatgatgaacaaaggtattcctcgtccaaacattgtgttcttcagctcagtaataaacagtctatgcaaggaaggaagggttaccgaggcacacgatatcttcgacttggctataaacattggcgagaggcctaacgttattacatttagttcactgattgacggatattgtttagccgggaagatggataaagcattcggagtactagatgctaacacttttgagtatttcaaggaaaatatgtgcaagagaataagtagatggaag

SEQ ID NO: 2811 - DNA, 849 bp, Triticum aestivum; identical to SEQ ID NO: 2810

SEQ ID NO: 2812 - DNA, 849 bp, Triticum aestivum; identical to SEQ ID NO: 2810

SEQ ID NO: 2813 - DNA, 849 bp, Triticum aestivum; identical to SEQ ID NO: 2810

SEQ ID NO: 2814 - DNA, 849 bp, Triticum aestivum; identical to SEQ ID NO: 2810

SEQ ID NO: 2815 - DNA, 849 bp, Triticum aestivum
atgccttgtgcaaggtcagggcaatggacaaggcaaagctggtccttcagcagatggttgataatggtgttcgaccaaatatgtatacatgcatggaactcattcatgtaccccctttgcaagaatggaggaagcaaagaagctgcagaattttttgactccatgacctccaagggcctcaaacctaatatcgtcgtgtactctactcttcttcacgggtatgctactgaaggatgcctagccgatatgattaatctctttaattcaatgaaagacaatgctattgtagccaactgcaatgttttcaacatattaattgatgcatatgctaaacgtggaatgatgcatgaagctatgctcatatttactgaaatgcaggaacaaagagtgagtcctaatgtattcacctatgcaattgtaacagctgcactttgcagaatgggcaggctgtctgatgcaatggacaaactaaatgagatgattgcaatgggattacaaccgaacaaggttgtttatcattctctaattcagggtttttgtacacatggtgatttggtgaaagcaaaggccttggtttctgaaatgatgaacaaaggtattcctcgtccaaacattgtgttcttcagctcagtaataaacagtctatgcaaggaaggaagggttaccgaggcacacgatatcttcgacttggctataaacattggcgagaggcctaacgttattacatttagttcactgattgacggatattgtttagccgggaagatggataaagcattcggaatactagatgctaacacttttgagtatttcaaggaaaatatgtgcaagagaataagtagatggaag

SEQ ID NO: 2816 - DNA, 849 bp, Triticum aestivum; identical to SEQ ID NO: 2810

SEQ ID NO: 2817 - DNA, 762 bp, Triticum aestivum
atggtctcagytggcttgagacctgacagtttttcttatgatacattgcttaatggctattgtaaagctggcaggatagataatgcatgttgtctttwmygagaaatgttgakgmmkggagttrygmctkrmratrmkacttacaatactatactgaatggcttgtttaggagtgggagattttctgaagcaagggaactctacgtcaatatgattaaaagtaggaaactgtggtccatttgcacatacagtataattcttgatgggttttgcaaaaacaattgttttgatgaagcattcaaaatatttcagagcctctgttctatggatcttcaacttgacataattacttttaacatcatgattgatggtttgttcaaaggtggcagaaaggaagatgccatggatttgttygctactatctctgcttatggtttggttccagatgttgtgacctaccgcttaatagcagaaaatctcatagaagaagggtcgctaggggagtttgatggtctgttttcagcaatggaaaagagtggtactgctccaaactcacatatgttaaatgctctagttaggaggttgttgcatagaggtgacataagcagggctggggtttacctctacaaacttgatgagaagaatttttcacttgaggcttccactacttccatgcttatatcactttactcgaggggtgaatatcagccacatgcaaagtcgctgcctgaaaagtatcgtttcctcattgaagccaacagt

SEQ ID NO: 2818 - DNA, 558 bp, Triticum aestivum
atgccccgcattcccctctgcaactccaccatgcccatgtcccgcatcggcctccgccgccgccgactttcctcctccttctccacctccacctccaccgcgcgatcctcacggtcatggtctccccacgccgcatttgccgcggccacggagcgcgtccgcgccgggacgctcagcccggaggacgcacaccacctgttcgaccaattgctacggcaggacactccggtccaggagcgctccctgggcggcttccttgccgccctcgcccgtgcgccagactcagcttcctgcagagatggcccctccctcgccctctccctcttcaaccgcgtatgccgagaagaagcaggccggcgggtggcgccgcccacagcctacacctacgccatcctgatgaactgctgctgccgcgtgcgtcgtccagacctagggcttgccttatttggccgcctcctaaggacaggcctcaaaacaaatgagatcgtcgccaacaccctcctcaagtgcctcttgctgcgcaaaacggacagacgaggctgtcagcgtgctgcttca

SEQ ID NO: 2819 - DNA, 558 bp, Triticum aestivum; identical to SEQ ID NO: 2818

SEQ ID NO: 2820 - DNA, 669 bp, Triticum aestivum
atgccccgcattcccctctgcaactccaccatgcccatgtcccgcatcggcctccgccgccgccgactttcctcctccttctccacctccacctccaccgcgcgatcctcacggtcatggtctccccacgccgcatttgccgcggccacggagcgcgtccgcgccgggacgctcagcccggaggacgcacaccacctgttcgaccaattgctacggcaggacactccggtccaggagcgctccctgggcggcttccttgccgccctcgcccgtgcgccagactcagcttcctgcagagatggcccctccctcgccctctccctcttcaaccgcgtatgccgagaagaagcaggccggcgggtggcgccgcccacagcctacacctacgccatcctgatgaactgctgctgccgcgtgcgtcgtccagacctagggcttgccttatttggccgcctcctaaggacaggcctcaaaacaaatgagatcgtcgccaacaccctcctcaagtgcctctgctgcgcaaaacggacagacgaggctgtcagcgtgctgcttcataggatgtccaagctaagcttggttgtgtgcctgatgccatctcatacaacacagttcttaagagcttatgtgataatagcagcagccagcgggcgctcgacctccttcaga

SEQ ID NO: 2821 - DNA, 669 bp, Triticum aestivum; identical to SEQ ID NO: 2820

SEQ ID NO: 2822 - DNA, 558 bp, Triticum aestivum; identical to SEQ ID NO: 2818

SEQ ID NO: 2823 - DNA, 558 bp, Triticum aestivum; identical to SEQ ID NO: 2818

SEQ ID NO: 2824 - DNA, 678 bp, Triticum aestivum; identical to SEQ ID NO: 2782

SEQ ID NO: 2825 - DNA, 411 bp, Triticum aestivum
atgccgagaagaagctggcccgcgggtggcgcagcccacaatcttcacctacggcgtcctcatgaactgatgcgtccgcactcgtccgcactcgggcttgttttcttcggccgtctcctcaggaggggcctgaagacaaacacgattgtcttcagctccctcctcaagtgcctctgtcacgccaaacggacagacgaggctgtcagcgtgctgcttcataggatgtctgagcttggttgtgtgcctgatgccttctcatacaccattgttcttaagagcttatgtgatggtagcagcagccagcgggcgctcgacctgctccagatgatggagaaaggagaaggtgtctgctctcccctggcgtggtgttatataccacggtcatccacggcctccttaaggaaggggaag

SEQ ID NO: 2826 - DNA, 411 bp, Triticum aestivum; identical to SEQ ID NO: 2825

SEQ ID NO: 2827 - DNA, 765 bp, Triticum aestivum
atgttggatcgcggcatctgtcccgacacagtgttcttcaacacaattatggaccgcctttgcaaaaatgaaagggttatggaagcccaagatctcttcgacctgatggtacacatgggtgtgaagcctgatgtatgtacttataacacactgataggtggatacttgtttgttggtaagatggatgaagtgagcaagttacttgacaatatggtctcaattggcatggaaccagatgttatcacctataacatactgattgatggttactctaagaatggaaagatagatgatgcattggttgtttttagggggatattggaaaggaaggataagccttctgttatcacttttaatattatgattggtgcgttgcttaaatgtcgcaggaaggaagaagcaaaagatttgtttgacggtatctgggccaaaggattagttcctgatgttgttacatatagcttaatgatacaaaaacttatagaagaaggttctctacaggagtctgatgatctattcctttctatggagaagaatggttatcctgccaattcctgcatgctaaatgctatagttagaaggttacttcagaaaggggagatgcccagggctgggacttatttgtctaaaattgatgagaggaatttcacccttgaagcttccacaactagcttgttgactgcacttgcttcagtggggaaatgtcaggaatataaggggttactgcctgaaaaatatcattgttttctggaacagggcactgat

SEQ ID NO: 2828 - DNA, 765 bp, Triticum aestivum; identical to SEQ ID NO: 2827

SEQ ID NO: 2829 - DNA, 765 bp, Triticum aestivum; identical to SEQ ID NO: 2827

SEQ ID NO: 2830 - DNA, 765 bp, Triticum aestivum; identical to SEQ ID NO: 2827

SEQ ID NO: 2831 - DNA, 765 bp, Triticum aestivum; identical to SEQ ID NO: 2827

SEQ ID NO: 2832 - DNA, 765 bp, Triticum aestivum; identical to SEQ ID NO: 2827

SEQ ID NO: 2833 - DNA, 780 bp, Triticum aestivum
atgaactattttctgagatgttggatcgcggcatttgtcccaacagtgttcttcaacacaattatggaccgcctttgcaaaaatgaaagggttatggaagcccaagatctcttcgacctgatggtacacatgggtgtgaagcctgatgtgtgtaattataacacactgataggtggatacttgttcgatggtaagatggatgaagtgaggaagttacttgacaatatggtctctattggcttgaaaccagatgttatcacatataccatactgattgatggttactctaagaatggaaggatagatgatgcattggttgtttccagggaaatgttggccgggaacgttaagccttgtgttatcactttgaatattatgattggtgcgttgcttaaaggtggcaggaaggaagaggctaaagatttgtttgatggtatctgggccaaaggattagtgcccaccgttgttacatatagcttaatgatacaaaaacttatagaagaaggttctctacaagagtcggatgatctattcctttctatggagaagaatggatgtgctgccgactcccatatgctaaatgctatagttagaagcttacttcggaaaggggaggtgcccagggctgggacttatctgtctaaaattgatgagaggaggttcacccttgaagcttccacagctagcttgttggctgcagttgcgtcaggggggaaaggccaggaatataaggagttactccccgaaaaataccactattttctggaacagggcactgat

SEQ ID NO: 2834 - DNA, 780 bp, Triticum aestivum; identical to SEQ ID NO: 2833

SEQ ID NO: 2835 - DNA, 780 bp, Triticum aestivum; identical to SEQ ID NO: 2833

SEQ ID NO: 2836 - DNA, 780 bp, Triticum aestivum; identical to SEQ ID NO: 2833

SEQ ID NO: 2837 - DNA, 780 bp, Triticum aestivum; identical to SEQ ID NO: 2833

SEQ ID NO: 2838 - DNA, 780 bp, Triticum aestivum; identical to SEQ ID NO: 2833

SEQ ID NO: 2839 - DNA, 681 bp, Triticum aestivum
atgtccgacctcggctgtgtgcctaactgcatctcacacggcatagttctaaagagcttgtgcgaagatagcaggagccagcaagcgctcgacctgctccggatgatggcaaaagaaggaggtgcctgctcccctagtctggtcacatataacacggtcatccacggcttcttcaaggaaggacaagtaagcaaggcatgcaatctataccatgaaatgatgcagcaaggggttgtgcctgatgtggtgacgtataactcgattattgatgcgctgtgcaaggccagagctatgggcaaggcagagttgttcctaaggcagatggttgataacggtgttcgaccagataacgtgacatatactgcagtaatccatggatattccactttgggccagtggaaaaaggcggctaaaatgtttagagaaatgacaagcctcggtcttgtaccaaatactgtcacttggaactcatccatggcctccctctgcaagcatggaagaagcaaagaagctgcagaaatttttcattccatggctgcgaagggccacaagcctgatgtcgtctcgtatcgtgttctgctccaagggtatgctacagagggtgctttgcagatatggttgatctctataattcaatgtcaagcaatggtattgtacccaatcgccaggttttcaacatat

SEQ ID NO: 2840 - DNA, 681 bp, Triticum aestivum; identical to SEQ ID NO: 2839

SEQ ID NO: 2841 - DNA, 816 bp, Triticum aestivum
atgtcatgtgtatacctgaaaaactttcctgctgcacacgttcaacaccgccaccaaaacggcaggacaactgacccgcgatcaatttgccacttcccagaccaggcgcgtcctccccacccccgacggctcacgcgccgccgccgccgccgccgccgccgctcctcctcctccacatccacctacccgcaaccgccaggtgtccagcttccgcctccacctccgcaactccttctctcccaccccgcccatgtgaccatgttccgcatgcgcctccgcaactcctccaccatgcccatgtcccgcatcggcctcctcctccgccgcctctcctcctcctcctcctcctcctacttctccacctccacctcgccaccctcacggtcacggtcatggtctccccgcgacgcctttgccgcggccacggagcgcgtccgtgccgggacgctcagcccggaggacgcacaccacctgtttgaccaattgctacggcaggacactccggtccacgagcgctccctgggcggcttccttgccgccctcgcccgtgcgccagactcggctgcctgcagagatggccccgccctcgccatcgccctcttcaaccgcgtatgccgagaagaagcaggcaggccggtggtgccgcccacagtctacacctacgccatcctgatgaactgctgctgccgcgtgcgtcgtccggacctagggcttgccttatttggccgcctcctaaggacaggcctcaaacaaatgagatcgtcgccagcaccgtcctcaagtgcctctgctgcgcaaaacggacagatgaagcag

SEQ ID NO: 2842 - DNA, 816 bp, Triticum aestivum
atgtcatgtgtatacctgaaaaactttcctgctgcacacgttcaacaccgccaccaaaacggcaggacaactgacccgcgatcaatttgccacttcccagaccaggcgcgtcctccccacccccgacggctcacgcgccgccgccgccgccgccaccgccgctcctcctcctccacatccacctacccgcaaccgccaggtgtccagcttccgcctccacctccgcaactccttctctcccaccccgcccatgtgaccatgttccgcatgcgcctccgcaactcctccaccatgcccatgtcccgcatcggcctcctcctccgccgcctctcctcctcctcctcctcctcctacttctccacctccacctcgccaccctcacggtcacggtcatggtctccccgcgacgcctttgccgcggccacggagcgcgtccgtgccgggacgctcagcccggaggacgcacaccacctgttcaaccaattgctacggcaggacactccggtccacgagcgctccctgggcggcttccttgccgccctcgcccgtgcgccagactcagctgcctgcagagatggccccgccctcgccatcgccctcttcaaccgcgtatgccgagaagaagcaggccggccggtggtgccgcccacagtctacacctacgccatcctgatgaactgctgctgccgcgtgcgtcgtccggacctagggcttgccttatttggccgcctcctaaggacaggcctcaaacaaatgagatcgtcgccagcaccgtcctcaagtgcctctgctgcgcaaaacggacagatgaagcag

SEQ ID NO: 2843 - DNA, 816 bp, Triticum aestivum; identical to SEQ ID NO: 2842

SEQ ID NO: 2844 - DNA, 816 bp, Triticum aestivum
atgtcatgtgtatacctgaaaaactttcctgctgcacacgttcaacaccgccaccaaaacggcaggacaactgacccgcgatcaatttgccacttcccagaccaggcgcgtcctccccacccccgacggctcacgcgccgccgccgccgccgccaccgccgctcctcctcctccacatccacctacccgcaaccgccaggtgtccagcttccgcctccacctccgcaactccttctctcccaccccgcccatgtgaccatgttccgcatgcgcctccgcaactcctccaccatgcccatgtcccgcatcggcctcctcctccgccgcctctcctcctcctcctcctcctcctacttctccacctccacctcgccaccctcacggtcacggtcatggtctccccgcgacgcctttgccgcggccacggagcgcgtccgtgccgggacgctcagcccggaggacgcacaccacctgttcgaccaattgctacggcaggacactccggtccacgagcgctccctgggcggcttccttgccgccctcgcccgtgcgccagactcagctgcctgcagagatggccccgccctcgccatcgccctcttcaaccgcgtatgccgagaagaagcaggccggccggtggtgccgcccacagtctacacctacgccatcctgatgaactgctgctgccgcgtgcgtcgtccggacctagggcttgccttatttggccgcctcctaaggacaggcctcaaacaaatgagatcgtcgccagcaccgtcctcaagtgcctctgctgcgcaaaacggacagatgaagcag

SEQ ID NO: 2845 - DNA, 816 bp, Triticum aestivum
atgtcatgtgtatacctgaaaaactttcctgctgcacacgttcaacaccgccaccaaaacggcaggacaactgacccgcgatcaatttgccacttcccagaccaggcgcgtcctccccacccccgacggctcacgcgccgccgccgccgccgccgccgccgctcctcctcctccacatccacctacccgcaaccgccaggtgtccagcttccgcctccacctccgcaactccttctctcccaccccgcccatgtgaccatgttccgcatgcgcctccgcaactcctccaccatgcccatgtcccgcatcggcctcctcctccgccgcctctcctcctcctcctcctcctcctacttctccacctccacctcgccaccctcacggtcacggtcatggtctccccgcgacgcctttgccgcggccacggagcgcgtccgtgccgggacgctcagcccggaggacgcacaccacctgtttgaccaattgctacggcaggacactccggtccacgagcgctccctgggcggcttccttgccgccctcgcccgtgcgccagactcagctgcctgcagagatggccccgccctcgccatcgccctcttcaaccgcgtatgccgagaagaagcaggcaggccggtggtgccgcccacagtctacacctacgccatcctgatgaactgctgctgccgcgtgcgtcgtccggacctagggcttgccttatttggccgcctcctaaggacaggcctcaaacaaatgagatcgtcgccagcaccgtcctcaagtgcctctgctgcgcaaaacggacagatgaagcag

SEQ ID NO: 2846 - DNA, 816 bp, Triticum aestivum; identical to SEQ ID NO: 2842

SEQ ID NO: 2847 - DNA, 564 bp, Triticum aestivum
atgctccatgagatggtcgaatgcggaacaacagtgagcttgtccacatacaacataattcttgggggactttgtagaaatgattgcaccgacgaagcaatcgtcctatttcagaaattaggtgcaatgaatgtgaaattggatatcacaacactcaataccatgattgatgcaatgtacaaggttcgtagaagacaagaagctaaagatttgtttgctgcaatatcagccagtggcttggtacctaattctcctacttacggcacaatgatacaaagtctacaaaaagaaggattaatggaagaagctgacaatatcttctcatcaatggagaagagtggctgtgttctgagctctcgtcttttaaatgatatcatcagaacattactggaaaagggggagattctaaaggccggaaattatatgtctaaaattgatgggaagaacgcccaacttgaagcttcaactagttcgttgttgttgtctctgttttcaggggaaggggaatctcgggaacaaatacagttgctccctgtaaagtaccaattcttcgatgcagttagt

SEQ ID NO: 2848 - DNA, 564 bp, Triticum aestivum
atgctccatgagatggtcgaatgtggaacaacagtgagcttgtccacatacaacataattcttggaggactttgtagaaatgattgcaccgacgaagcaatcgtcctatttcagaaattaggtgcaatgaatatgaaattggatatcacaacactcaataccatgattgatgcaatgtacaaggttcgtagaagacaagaagctaaagatttgtttgctgcaatatcagccagtggcttggtacctaattctcctacttacggcacaatgatacaaagtctactaaaagaaggattaatggaagaagctgacaatatcttctcgtcaatggagaagagtggctgtgttctgagctctcgtcttttaaatgatatcatcagaacattactggaaaagggagagattctaaaggccggaaattatatgtctaaaattgatgggaagaacgcccaacttgaagcttcaactagttcgttgttgttgtctctgttttcaggggaagggaaatatcgggaacaaatacagttgctccctgtaaagtaccaattcttcgatgcagttagt

SEQ ID NO: 2849 - DNA, 564 bp, Triticum aestivum; identical to SEQ ID NO: 2847

SEQ ID NO: 2850 - DNA, 564 bp, Triticum aestivum; identical to SEQ ID NO: 2847

SEQ ID NO: 2851 - DNA, 564 bp, Triticum aestivum; identical to SEQ ID NO: 2847

SEQ ID NO: 2852 - DNA, 564 bp, Triticum aestivum; identical to SEQ ID NO: 2847

SEQ ID NO: 2853 - DNA, 564 bp, Triticum aestivum; identical to SEQ ID NO: 2847

SEQ ID NO: 2854 - DNA, 666 bp, Triticum aestivum
atgtccgagctcggttgtgtgcctgatgccttctcttacaccattgttcttaagatcttatgtgatgctagcagcagccagtgggcgctcgacctgctccagactatggagaaaggaggaggtgtctgctcccctgacgtggtgtcatataccacggtcatccacaacctccttaaggaaggggaagtaagcaaggcatgcaatctataccatgaaatggtgcagcaaggggttgtgcctgatgtgaggacatatagctcgattattaatgcgctatgcaaggccgaagcaatggacaaggcagagttgttccttcgtcagatggttgataagggtgttcggccgaataacaagacatatactagcataatccatggatattccacgttgggccggtggaaagaagctggcaaaatgttcagagaaatgacaagccagggtatcataccagatgttgttacttggacctcattcatggcctccttctgcaagcatggaagaagcagagaagctgccaaaatttttgattacatgtcttccaggggacacaagcctaatgtcgtctcatattctattttgtttcatggatatggtatagaaggatgctttgctgatatgattaatctccttaattcaatggcaaacaacggtattgttcccaatcgc

SEQ ID NO: 2855 - DNA, 666 bp, Triticum aestivum
atgtccgagctcggttgtgtgcctgatgccttctcttacaccattgttcttaagatcttatgtgatgctagcagcagccagtgggcgctcgacctgctccagactatggagaaaggaggaggtgtctgctcccctgacgtggtgtcatataccacggtcatccacaacctccttaaggaaggggaagtaagcaaggcatgcaatctataccatgaaatggtgcagcaaggggttgtgcctgatgtgaggacatatagctcgattattaatgcgctatgcaaggccgaagcaatggacaaggcagagttgttccttcgtcagatggttgataagggtgttcggccgaataacaagacatatactagcataatccatggatattccacgttgggccggtggaaagaagctggcaaaatgttcagagaaatgacaagccagggtatcataccagatgttgttacttggacctcattcatggcctccttctgcaagcatggaagaagcagagaagctgccaaaaattttgattacatgtcttccaggggacacaagcctaatgtcgtctcatattctattttgtttcatggatatggtatagaaggatgctttgctgatatgattaatctccttaattcaatggcaaacaacggtattgttcccaatcgc

SEQ ID NO: 2856 - DNA, 666 bp, Triticum aestivum; identical to SEQ ID NO: 2854

SEQ ID NO: 2857 - DNA, 666 bp, Triticum aestivum
atgtccgagctcggttgtgtgcctgatgccttctcttacaccattgttcttaagatcatatgtgatgcttgcagcagccagtgggcgctcgacctggtccagactatggagaaaggaggaggtgtctgctcccctgacgtggtgtcatataccacggtcatccacgacctccttaaggaaggggaagtaagcaaggcatgcaatctataccatgaaatggtgcagcaaggggttgtgcctgatgtgaggacatatagctcgattattaatgcgctatgcaaggccgaagcaatggacaaggcagagttgttcctttgtcagatggttgataatggtgttcggccgaataacaagacatatactagcataatccatggatattccacgttgggccggtggaaagaagctggcaaaatgttcagagaaatgacaagccagggtatcataccagatgttgttacttggacctcattcatggcctccttctgcaagcatggaagaagcagagaagctgccaaaatttttgattacatgtcttccaggggacacaagcctaatgtcgtctcatattctattctatttcatggatatggtacagaaggatgctttgctgatatgattaatctccttaattcaatggcaaacaacggtattgttcccaatcgc

SEQ ID NO: 2858 - DNA, 666 bp, Triticum aestivum; identical to SEQ ID NO: 2857

SEQ ID NO: 2859 - DNA, 666 bp, Triticum aestivum; identical to SEQ ID NO: 2854

SEQ ID NO: 2860 - DNA, 516 bp, Triticum aestivum
atggactgctgctgccgtgcgcgtcgcccggagctagggcttgccttattcgtccgcgtcctcaggaagggcctaaagacaaaccagatcgtcgcgaacaccttcctcaagtgcctctgctatgcgaaaaggacggatgaggctgtgaacgtgctgcttcataggatgtccgagctcggctgtgtgccagatgccttctcatacaacattgttctgaagatcttctgcgacaatagcatgagccagcgagggctcgaacttctccagatgatggcgaaagaaggaggtggctgcttccctgatatggtggcatataacacggtcatccatggcctctttaaggagggtgaaataggcaaggcatgcaatctattccatgaaatggtgcagcaaggtgttgtgcctggtgtggtgacatatagctcgattattgacgcgctgtgcaaggccagagcaatggacaaggcagagctagtccttcggcagatggttgccaatggtgctcaacccaatcaa

SEQ ID NO: 2861 - DNA, 516 bp, Triticum aestivum; identical to SEQ ID NO: 2860

SEQ ID NO: 2862 - DNA, 516 bp, Triticum aestivum; identical to SEQ ID NO: 2860

SEQ ID NO: 2863 - DNA, 516 bp, Triticum aestivum; identical to SEQ ID NO: 2860

SEQ ID NO: 2864 - DNA, 567 bp, Triticum aestivum
atgagaagccaaggtgttatgccaaatgttgttacctgcaactcagtcatgacctaccattgcaagaatggaagagtcaaagaagctgcagaaatattttattccatggctgtgaacggccgaaaacctgatgtcatctcatactctattatgctccacgggcacgcgacagaaggatccattgttgaaatgattgatctctgtgagctgatggcaagagacggagttgtacccaaccgctctgttttcaacatactgattaaggcatatgctaagtatggcatgatggatgtggccatgcttttcttcgaagacatgttgaagaagggggtgaaccctaatgaagtcacttatttaaccgtgatatctgcattttgcaagatgggcaggatggatgatgcgatggaaaaattcaatgagatgattgatatgggagtaccacttgacacagaagtttacatgtgcatggttgagggttattttaatcatgatgattccatgaaagcggaggaatttattactaaaatgaagagcagggatatttttcataggccgcggaagggtaat

SEQ ID NO: 2865 - DNA, 567 bp, Triticum aestivum; identical to SEQ ID NO: 2864

SEQ ID NO: 2866 - DNA, 567 bp, Triticum aestivum; identical to SEQ ID NO: 2864

SEQ ID NO: 2867 - DNA, 567 bp, Triticum aestivum; identical to SEQ ID NO: 2864

SEQ ID NO: 2868 - DNA, 567 bp, Triticum aestivum; identical to SEQ ID NO: 2864

SEQ ID NO: 2869 - DNA, 567 bp, Triticum aestivum; identical to SEQ ID NO: 2864

SEQ ID NO: 2870 - DNA, 759 bp, Triticum aestivum
atgagccgccgcgtcgtccccgttggcaggcgcatcttggagcagaacatcaaggctcggtaccacgccagagacattggcaccgaggatgcactccacctgtttgacgaattgctcccgtatgctgggcgctcctccatccatgccatcaactgcctcctcaccgttgtcggccgtgattgccctgcgctcggcgcctccctcttcaaccgcgtcgcaaggtccaaggtggcacccagcagtatcacctatgccattctggtcgactgctgctgccgcgctggccgccaggaccttggacacactgccatgggacaggtcatcaagatggggtttcttgcagatgctatgatcactttcagccacctactcaaggccatctgtgcggagaacaagaccagctatgcaatggacatcctactccgaataatgcccatgtttaactgcgtaccggatgtcatctcctacaacattcttttcaagggtgactgcaacgagaagagaagccaagaggctctcgagctgattcaggtgatggttgagcatggaggtggctgccaacctactgtggtgtcctatagcaccgtaattgatggcttgttgaaagagggtgaggtgaacaaggcttacagcctattttgtcaaatgttacaaaggggaatttcaccggatgttgtgacctgtagttcaattatttctggcatgtgcaagcttcatgcgatggacaaggctgaggaggttcttcaacagatgcttgat

SEQ ID NO: 2871 - DNA, 759 bp, Triticum aestivum; identical to SEQ ID NO: 2870

SEQ ID NO: 2872 - DNA, 759 bp, Triticum aestivum; identical to SEQ ID NO: 2870

SEQ ID NO: 2873 - DNA, 627 bp, Triticum aestivum
atggactgctgctgccgtgtgcgtcgcccgaagctagtgcttaccttattcagcctattcctgatgaaaggcctgaagacaaaccagatcattgtcaacaccttcctcaagtgcctctgctatgcgaaaaggacggacgaggctgtgaatgtgctgcttcataggatggctgagctcgtctgcgtgcctaatgccttctcatacaacattgttctgaagagcttctgcgactatagcatgagccaacgggcgctcgaactgctccagatgatcgcgaaagaaggaggtggctgcttccctgatgtggtggcatataacacggtcatccatggcctctttatggagggcgaaacaggcaaggcatgcaatctattccatgaaatggtgcagcaagatgttgcgcccagtgtggtgacatatatctcgattattgacgctttgtgcaaggccagagcaatggagaaggcagagctagtcctttggcagatggttgctaatggtgctcatcccgatacaatgacatatagttgcatgatcaatggatattccacatctgggcggttgaaagaggccactaaattgttaagagaaatgacaggccggggtcttataccagatattgttact

SEQ ID NO: 2874 - DNA, 777 bp, Triticum aestivum
atggactgctgctgccgtgtgcgtcgcccgaagctagtgattaccttattcagcctcttcctgatgaaaggcctgaagacaaaccagatcattgtcaacaccttcctcaagtgcctctgctatgcgaaaaggacggacaaggctgtgaatgtgctgcttcataggatgtctgagctcggctgcgtgcctaatgccttctcatacaacattgttctgaagagctcctgcgactatagcatgagccaacgggcgctcgaactgctccagatgatcgcggaagaaggaggtggctgcttccctgatgtggtggcatataacacggtcatccatggcctctttatggagggcgaaacaggcaaggcatgcaatctattccatgaaatggtgcagcaagatgttgcgcccagtgtggtgacatatatctcgattattgacgctttgtgcaaggccagagcaatggagaagacagagctagtcctttggcagatggttgctaatggtgctcatcctgatacaatgacatatagttgcatgatcaatggatattccacatctgggcggttgaaagaggccactaaattgttaagagaaatgacaggccggggtcttataccagatattgttacttgcaactcgttcctggcctccctttgcaagcttggaagaagcaaagaagctgcagaattttttgaatccatgactgccaagggccacaaaactggatatcgtctcataccacattttgcttcatgggtatgctaccgaaggatgctttgc

SEQ ID NO: 2875 - DNA, 762 bp, Triticum aestivum
atggactgctgctgccgtgtgcgtcgcccgaagctagtgcttaccttattcagcctcttcctgatgaaaggcctgaagacaaaccagatcattgtcaacaccttcctcaagtgcctctgctatgcgaaaaggacggacaaggctgtgaatgtgctgcttcataggatgtctgagctcggctgcgtgcctaatgccttctcatacaacattgttctgaagagcttctgcgactatagcatgagccaacgggcgctcgaactgctccagatgatcgcgaaagaaggaggtggctgcttccctgatgtggtggcatataacacggtcatccatggcctctttatggagggcgaaacaggcaaggcatgcaatctattccatgaaatggtgcagcaagatgttgcgcccagtgtggtgacatatatctcgattattgacgctttgtgcaaggccagagcaatggagaaggcagagctagtcctttggcagatggttgctaatggtgctcatcctgatacaatgacatatagttgcaagatcaatggatattccacatttgggcggttgaaagaggccactaaattgttaagagaaatgacaggccggggtcttataccagatattgttacttgcaactcgttcctggcctccctttgcaagcttggaagaagcaaagaagctgcagaattttttgaatccatgactgccaagggccacaaaactggatatcgtctcataccacattttgcttcatgggtatgctac

SEQ ID NO: 2876 - DNA, 762 bp, Triticum aestivum
atggactgctgctgccgtgtgcgtcgcccgaagctagtgcttaccttattcagcctcttcctgatgaaaggcctgaagacaaaccagatcattgtcaacaccttcctcaagtgcctctgctatgcgaaaaggacggacaaggctgtgaatgtgctgcttcataggatgtctgagctcggctgcgtgcctaatgccttctcatacaacattgttctgaagagcttctgcgactatagcatgagccaacgggcgctcgaactgctccagatgatcgcgaaagaaggaggtggctgcttccctgatgtggtggcatataacacggtcatccatggcctctttatggagggcgaaacaggcaaggcatgcaatctattccatgaaatggtgcagcaagatgttgcgcccagtgtggtgacatatatctcgattattgacgctttgtgcaaggccagagcaatggagaaggcagagctagtcctttggcagatggttgctaatggtgctcatcctgatacaatgacatatagttgcatgatcaatggatattccacatctgggcggttgaaagaggccactaaattgttaagagaaatgacaggccggggtcttataccagatattgttacttgcaactcgttcctggcctccctttgcaagcttggaagaagcaaagaagctgcagaattttttgaatccatgactgccaagggccacaaaactggatatcgtctcataccacattttgcttcatgggtatgctac

SEQ ID NO: 2877 - DNA, 777 bp, Triticum aestivum; identical to SEQ ID NO: 2874

SEQ ID NO: 2878 - DNA, 762 bp, Triticum aestivum; identical to SEQ ID NO: 2876

SEQ ID NO: 2879 - DNA, 537 bp, Triticum aestivum
atggactgctgctgccgcgcgcgtcgccctgacctggggcttgccttcttcggccgcctcctcaggacgggcctgaggacagacggcatcgacgcatacgccctcatcaggtgcttttgcctcgcaaaacggacagacaaggctgtcagcgtgctgctccataggatgcctgaactcggctgtgcgcctgatgccttgtcatactccgtcgttctgaaggtcttgtgtgacgatggcaggagccagcgagcgcttgacctgccccagatgatgtcgaaagaaggaggtggctgcgcccccaacgtggtggcatatagcacggtcatccatggcttctgtaaggaaggcgaagtaagcaaggcatgcgatctgttcaatgaaatggagcatcaaggagttaaacctaatgtggtgacatatacctcgataattgatgcgctgtgcaaggccagagcaatggacaaggcagagtcgttccttcggcagatggtcgataatgatgttcgacccaacaacgtggcatataagtgtatgatc

SEQ ID NO: 2880 - DNA, 537 bp, Triticum aestivum; identical to SEQ ID NO: 2879

SEQ ID NO: 2881 - DNA, 537 bp, Triticum aestivum; identical to SEQ ID NO: 2879

SEQ ID NO: 2882 - DNA, 537 bp, Triticum aestivum; identical to SEQ ID NO: 2879

SEQ ID NO: 2883 - DNA, 537 bp, Triticum aestivum; identical to SEQ ID NO: 2879

SEQ ID NO: 2884 - DNA, 537 bp, Triticum aestivum; identical to SEQ ID NO: 2879

SEQ ID NO: 2885 - DNA, 537 bp, Triticum aestivum; identical to SEQ ID NO: 2879

SEQ ID NO: 2886 - DNA, 729 bp, Triticum aestivum
atgtcaagcctccgcgtcctccgccgcagctccacctccacctccacctccacctcgccgccctcgcgctcctggtctcccaccgcagcctttgccgcggccacagagcgtgtccgcgccgggacgctcagccaagatgatgcacaccacctgttcgacgaattgctgcggcaggtcaccccggtccccgagcgccccctcaacggcttcctcgccgccctcgcacgtgctacgtcctctgccgcctgcatcagagatggtcccgccctcgacgtcgccctcttcaaccgcgtgtgccgagaacaagccggcccgcgggtggcgcctctcacagtccacacgtacaacatcctcatggactgctgctgccgcgcgtctcgcccggacctaggtcttgccttcttcgctcgcctcctcaggacaggcctgaagacagatgagatcaccgccaacaccttcctcaagtgcctctgctacgcaaaacggacggatgaggctgtgaacgtgctgcttcataggatgtccgagcttggctgtgtgcctaatgccttctcatactccattgttctgaagagcttatgcgacaatagcatgagtcagcgggcgctcgacctgctccagatgatggcgaaagaaggaggtgcctgctcccccaacgtggtggcatatagcacggtcatccatggcttcttaggaaggcgaaacaggcaaggcatgcaatctgttcca

SEQ ID NO: 2887 - DNA, 729 bp, Triticum aestivum; identical to SEQ ID NO: 2886

SEQ ID NO: 2888 - DNA, 729 bp, Triticum aestivum; identical to SEQ ID NO: 2886

SEQ ID NO: 2889 - DNA, 729 bp, Triticum aestivum
atgtcaagcctccgcgtcctccgccgcagctccgcctccacctccacctccacctcgccgccctcgcgctcctggtctcccaccgcagcctttgccgcggccacagagcgtgtccgcgccgggacgctcagccaagatgatgcacaccacctgttcgacgaattgctgcggcaggtcaccccggtccccgagcgccccctcaacggcttcctcgccgccctcgcacgtgctacgtcctctgccgcctgcatcagagatggtcccgccctcgacgtcgccctcttcaaccgcgtgtgccgagaacaagccggcccgcgggtggcgcctctcacagtccacacgtacaacatcctcatggactgctgctgccgcgcgtctcgcccggacctaggtcttgccttcttcgctcgcctcctcaggacaggcctgaagacagatgagatcaccgccaacaccttcctcaagtgcctctgctacgcaaaacggacggatgaggctgtgaacgtgctgcttcataggatgtccgagcttggctgtgtgcctaatgccttctcatactccattgttctgaagagcttatgcgacaatagcatgagtcagcgggcgctcgacctgctccagatgatggcgaaagaaggaggtgcctgctcccccaacgtggtggcatatagcacggtcatccatggcttcttaggaaggcgaaacaggcaaggcatgcaatctgttcca

SEQ ID NO: 2890 - DNA, 729 bp, Triticum aestivum; identical to SEQ ID NO: 2889

SEQ ID NO: 2891 - DNA, 729 bp, Triticum aestivum; identical to SEQ ID NO: 2886

SEQ ID NO: 2892 - DNA, 399 bp, Triticum aestivum
atggactgctgctgccgcgcgcgtcgcccggacctagggcttgccttattcggccgcttcctcaggacaggcctgaggacaaacgagatcgtcgccaccaccttcctcaagtgcctctgctgcgcaaaacagatagatgaggctgtgaaagtactgcttcacaggatgcccaagctgggctgtgtgcctaatgccatctcatactccatagttttgaaaagcttgtgtgaaaatagcatgagtcagcaggcactcgacctgctccagatggtagggaaagaaggaggctgccttcgtgatgtgatggcatataacacaatcatccatggcttctttaaggagggcggaatagacaaggcaaggggttatgccgactgtggtgacatacaacacagtaat

SEQ ID NO: 2893 - DNA, 684 bp, Triticum aestivum
atgcctcgcctctgctccaccacgcccatggcccgcctccgccgccggcgccgctactcctcctccacctcgtcgccttcacgccgttgggacccccgagccgcctttgccgcggccacggagcgcatccgcgccgggacgctcaggcctgaagacgcacaccacctgttcgacgaattgctactgcaggccaaccccgtccccgagcgctccctcagcgacttccttgccgcgctcgcccgtgctccgtcctccgctgctctcagagatggaccctcccttgctctcggcctcttcaacctcgtctgccgagaagaagcagggccgcaggtggcgccacccacaacctgcacctacaacatactcatggacagctgctgccgtgcacgccgcccggacctaggccttgccttcttcggccgcttcctgagtacgggcctcaaggcaaaccagatcgtcgccaccaccctcctcaagtgcctctgccacgcaagacggacagatgaggcaatcaacgtgctgctccataggatgtctgaattcggatgtgtgcctaatgtcatctcatactctatagtacttaagagcttatgtgatgatagcaggagccagcaagcgctcgacttgctccagatggtgaggaaaggaggtgcggctccctcagtgtggtggcatatagcacag

SEQ ID NO: 2894 - DNA, 684 bp, Triticum aestivum; identical to SEQ ID NO: 2893

SEQ ID NO: 2895 - DNA, 684 bp, Triticum aestivum; identical to SEQ ID NO: 2893

SEQ ID NO: 2896 - DNA, 684 bp, Triticum aestivum; identical to SEQ ID NO: 2893

SEQ ID NO: 2897 - DNA, 684 bp, Triticum aestivum; identical to SEQ ID NO: 2893

SEQ ID NO: 2898 - DNA, 684 bp, Triticum aestivum; identical to SEQ ID NO: 2893

SEQ ID NO: 2899 - DNA, 738 bp, Triticum aestivum
atgattgataaaggtgttaagccagacaatttgacatacactataatcattgatggcctatgcaaagctcaatcggttgatagggctgagggtgtctttcagcagatgattgataaaggtgttaagccaaacaatgggacatataattgtctcatccatggatacctatcaacaggacagtgggaagaggtggttcaaaggatcaaagaaatgtctgcacatgatcttgagccagatgtttttacttatggtttgcttctrgactatctatgcragaatggaaaktgcartgaagctagaagtttwtttgattctatgattaggaagggcataaaacctrrtgtwactatctaykscattatgcttcatggatatggtaccaaaggagctctttctgaaatgcatgatctcctgaatttgatggtagcaaatggtatttcccctaatcatcgcatcttcaacaccatgatctatgcatatgmtaaagaggcaatgatagatgaggcgatgcatatatttatcaaaatgaaacagcaaggtttaagtccagatgccgtcagttatgcagaattaatagatgcactttgcaagttgggcagagtggatgatgccgttctccaattcaagcagatgatcaatgaaggagtgactcctgacaatgtagtttttaactcccttgtttatggactttgcactgttgacaaatgggagaaggttgagaattatttttcgaaatgc

SEQ ID NO: 2900 - DNA, 759 bp, Triticum aestivum
atgagccgccgctttgtccccgtcgacagacgcatcttggagcggaacatcaaggctcggtaccacgctggagacattggcaccgaggatgcactcaacctgttcgacgaattgatccaggttgctgggccttcctcagtcctcgccatcaactgcctcctcaccgttgtcggccgtgattgccccgcgctcggcgtctccctcttcaaccgtgttgcaagagccaaggtgcctccccacaatatcacctatggcattctagtcgactgctgctgccgtgctggccgcttggaccttggacatgctggcatggggcacgtcattaagttgggatttgcagcagaagccatcgtcaatttcagccacctactcaaggccatctgcgccgaggagaagaccagctatgcaatggaaatcgtactccggataatgcctgaatttaactgcatcccgaacattttctcatacagcattcttttgaagggtctttgcaacgagaagaggagccaagaggctctcgagctgattcacatgatgattgaccatggaggtagctgccaacctaatgtggtgtcctatagcaccgtacttgatggcttgttgaaagatggtgaggtgggcaaggcctacagcctattttgtgtcatgctacagaggggaatttcgccgaatgttgtgacctgcaattcaatcatctctggcatgtgcaaagttcatgcgatggacaaggcagaggaggttcttcaacagatgactgat

SEQ ID NO: 2901 - DNA, 759 bp, Triticum aestivum; identical to SEQ ID NO: 2900

SEQ ID NO: 2902 - DNA, 759 bp, Triticum aestivum; identical to SEQ ID NO: 2900

SEQ ID NO: 2903 - DNA, 615 bp, Triticum aestivum
atgagccgccgctttgtccccgtcgacagacgcatcttggagcggaacatcaaggctcggtaccacgctggagacattggcaccgaggatgcactcaacctgttcgacgaattgatccaggttgctgggccttcctcagtcctcgccatcaactgcctcctcaccgttgtcggccgtgattgccccgcgctcggcgtctccctcttcaaccgtgttgcaagagccaaggtgcctccccacaatatcacctatggcattctagtcgactgctgctgccgtgctggccgcttggaccttggacatgctggcatggggcacgtcattaagttgggatttgcagcagaagccatcgtcaatttcagccacctactcaaggccatatgtgcggagaagaagaccagctatgcaatggacattgtactccggataatgcctgaatttaactgcatcccgaacattttctcatacagcattcttttgaagggtctttgcaacgagaagaggagccaagaggctctcgagctgattcacatgatgattgaccatggaggtagctgccaacctaatgtggtgtcctatagcaccgtacttgatggcttgttgaaagagggtgag

SEQ ID NO: 2904 - DNA, 615 bp, Triticum aestivum
atgagccgccgctttgtccccgtcgacagacgcatcttggagcggaacatcaaggctcggtaccacgctggagacattggcaccgaggatgcactcaacctgttcgacgaattgatccaggttgctgggccttcctcagtcctcgccatcaactgcctcctcaccgttgtcggccgtgattgccccgcgctcggcgtctccctcttcaaccgtgttgcaagagccaaggtgcctccccacaatatcacctatggcattctagtcgactgctgctgctgtgctggccgcttggaccttggacatgctggcatggggcacgtcattaagttgggatttgcagcagaagccatcgtcaatttcagccacctactcaaggccatatgtgcggagaagaagaccagctatgcaatggacattgtactccggataatgcctgaatttaactgcatcccgaacattttctcatacagcattcttttgaagggtctttgcaacgagaagaggagccaagaggctctcgagctgattcacatgatgattgaccatggaggtagctgccaacctaatgtggtgtcctatagcaccgtacttgatggcttgttgaaagagggtgag

SEQ ID NO: 2905 - DNA, 723 bp, Triticum aestivum
atgtcaagcctccgcctcctccgccgcagttccacctccacctccacctcgccgccctcgcgctcctggtctcccaccgcagcctttgccgcggccacagagcgtgtccgcgccgggacgcttagccaagatgacgcacaccacctgttcgacgaattgctgcggcaggccaccccggtccccgagcgccccctcaacggcttcctcgccgccctcgcacgtgctacgtcctctgccgcctgcatcacagatggccctgccctcgccgttgccctcttcaaccgcgtgtgtcgagagcaatccggcccgcgggtggtgcctctcacagtttgcacctacaacatcctcatggactgctgctgccgcacgtctcgcacggacctaggtcttgccttcttcgctcgactcctcaggacaggcctgaagacagatgagatcaccgccaacaccttcctcaagtgcctctgctacgcaaaacggacggatgaggctgtgaacgtgctgcttcataggatgtccgagctcggctgtgtgcctaatgccttctcatactccattgttctgaagagcttatgcaacaataacatgagtcagcgggcgctcgacctgctccagatgatggcgaaagatagaggtagctgtttccctgatgtggtggcatatagcagtcatccatggctttttcaaggaaggcgaaacaagcaaggcatgcaatctgttcca

SEQ ID NO: 2906 - DNA, 792 bp, Triticum aestivum
atgtcacgccttcaggtccgctctttctccagctccgtttcctcacgcgccaacgagctgctgaacgaactccacgaccatcttggcttcgggacactcaggccagagctcgcgcaccaactgttcgacgaaatgctgcaccaacctgtcacagtatcagtacgtgcactcgacgacttatttgctgccctcgcgcgtgtgccggcctcacctgcctgcaccgatggccctgccctcgccattgatctcttcaaccgcatggcccgagcaggccgtcgccaggtgctagcaccctccatttacacctacaacatactaattgagtgttgccaccgagcatgccgcccagacctagggcctgccttcttcggccgcctcctcaagacaggcatcaagacggatgtcgttacctacagcagcttactcaagtgcctctgtgacatgaagcgaacagaggaggctttgggcgtgctgctccacaggatgcccgacgacctgcctaatgtcatctcctactcagtaattctcaagagtttctgcgacagtggtaggagccagcttgcacttgacttgctccggatgatggccgaaaaaggatctgaccactctcccagcatggtgttatacagcttggtaatcgatggcttcttgaaggagggtgaaataagcaaagcatgcaatttgctccctgaaatgatgcagcagggggttgtgcctgatgtggtgacgtataactcctttatcgatgcgctatgcaaagcaagagcaatggacaaggcagaggtagttctt

SEQ ID NO: 2907 - DNA, 792 bp, Triticum aestivum
atgtcacgccttcaggtccgctctttctccagctccgtttcctcacgcgccaacgagctgctgaacgaactccacggccatcttggcttcgggacactcaggccagagctcgcgcaccaactgttcgacgaaatgctgcaccaacctatcacagtatcagtacgtgcactcgacgacttatttgctgccctcgcgcgtgcgccggcctcacctgcctgcaccgatggccctgccctcgccattgatctcttcaaccgcatggcccgagcaggccgtcgccaggtgctagcaccctccatttacacctacaacatactaattgagtgttgccaccgagcatgccgcccagacctagggcctgccttcttcggccgcctcctcaagacaggcatcaagacggatgtcgttacctacatcagcttactcaagtgcctctgtgacatgaagcgaacggaggaggctttgggcgtgctgctccacaggatgcccgacgacctgcctaatgtcatctcctactcagtaattctcaagagtttctgcgacagtggtaggagccagcttgcacttgacttgctccggatgatggccgaaaaaggatctgaccactctcccagcgtggtgttatacagcttggtaatcgatggcttcttgaaggagggtgaaataagcaaagcatgcaatttgctccctgaaatgatgcagcagggggttgtgcccgatgtggtgacgtataactcctttatcgatacgctatgcaaagcaagagaaatggacaaggcagaggtagttctt

SEQ ID NO: 2908 - DNA, 792 bp, Triticum aestivum
atgtcacgccttcaggtccgctctttctccagctccgtttcctcacgcgccaacgagctgctgaacaaactccacgaccatcttggcttcgggacactcaggccagagctcgcgcaccaactgttcgacgaaatgctgcaccaacctgtcacagtatcagtacgtgcactcgacgacttatttgctgccctcgcgcgtgtgccggcctcacctgcctgcaccgatggccctgccctcgccattgatctcttcaaccgcatggcccgagcaggccgtcgccaggtgctagcaccctccatttacacctacaacatactaattgagtgttgccaccgagcatgccgcccagacctagggcctgccttcttcggccgcctcctcaagacaggcatcaagacggatgtcgttacctacagcagcttactcaagtgcctctgtgacatgaagcgaacagaggaggctttgggcgtgctgctccacaggatgcccgacgacctgcctaatgtcatctcctactcagtaattctcaagagtttctgcgacagtggtaggagccagcttgcacttgacttgctccggatgatggccgaaaaaggatctgaccactctcccagcatggtgttatacagcttggtaatcgatggcttcttgaaggagggtgaaataagcaaagcatgcaatttgctccctgaaatgatgcagcagggggttgtgcctgatgtggtgacgtataactcctttatcgatgcgctatgcaaagcaagagcaatggacaaggcagaggtagttctt

SEQ ID NO: 2909 - DNA, 792 bp, Triticum aestivum
atgtcacgccttcaggtctgctctttctccagctccgtttcctcacgcgccaacgagctgctgaacgaactccacgaccatcttggcttcgggacactcaggccagagctcgcgcaccaactgttcgacgaaatgctgcaccaacctgtcacagtatcagtatgtgcactcgatgacttatttgctgccctcgcgcgtgtgccggcctcacctgcctgcaccgatggccatgccctcgccattgatctcttcaaccgcatggcccgagcaggccgtcgccaggtgctagcaccctccatttacacctacaacatactaattgagtgttgccaccgagcatgccgcccagacctagggcctgccttcttcggccgcctcctcaagacaggcatcaagacggatgtcgttacctacagcagcttactcaagtgcctctgtgacatgaagcgaacggaggaggctttgggcgtgctgctccacaggatgcccgacgacctgcctaatgtcatctcctactcagtaattctcaagagtttctgcgacagtggtaggagccagcttgcacttgacttgctccggatgatggccgaaaaaggatctgaccactctcccagcgtggtgttatacagcttggtaatcgatggcttcttgaaggagggtgaaataagcaaagcatgcaatttgctccctgaaatgatgcagcagggggttgtgcccgatgtggtgacgtataactcctttatcgatgcgctatgcaaagcaagagcaatggacaaggcagaggtagttctt

SEQ ID NO: 2910 - DNA, 792 bp, Triticum aestivum; identical to SEQ ID NO: 2908

SEQ ID NO: 2911 - DNA, 792 bp, Triticum aestivum; identical to SEQ ID NO: 2906

SEQ ID NO: 2912 - DNA, 792 bp, Triticum aestivum; identical to SEQ ID NO: 2908

SEQ ID NO: 2913 - DNA, 531 bp, Triticum aestivum
atggcgcagcagggcgttaagcctaatgtggtgacatataactcagttatcgatgcgctgtgcaaggccaaagccatggacaaggcagaggtggtccttcgtcaaatgattgatcatagtgttggacctaatagcgtgacgtatagtagcctcatccatggatattcctcttcaggccactggaaggaggcagttagggtattcaaagagatgacaagtcggagggttacagcagatgtgcatacttacaacatgtttatgacctttctttgcaagaatggaaaaagcaaagacgctgcagaaatttttaattcaatggccacgaagggcctaaaacctacgaccgtttcatatgctattctccttcatgggtatgccaccgaaggatgcttagttgatatgactaatttcttcaattcaatggaaagagactgtattctaccagactgttgtatcttcagcatactgattaatgcatatgctaaatctgggaagcttgataaggcaatgcttttacacacggcgatttgg

SEQ ID NO: 2914 - DNA, 645 bp, Triticum aestivum
atgtcccacgtccgcctccacctccaccgccggctcctctcatccacctcgccgccctcacgttcctggtctccccgcgacgcctttgccgtgaccacagagcggctgcgcgccgggacgctctgtcgagacgatgcacacaacctgttcgacgaattgtttcggcaggcaatcccggtccccgaccgctccctgaacggcttccttgccgccctcgcccgtgctacgtcctctggcgcctgcatcagagatggccccgccctcttcaaccgcgtgtgccgagaacaagccggctcgcaggtggcgcctctcacagtccacacctacaacatcctcatggactgctgctgccgtgcgtgtcgcccagatctagggcttgccttgttcgggtgtatcctcaggacgggcttgaagatagaacaaatcaccgccaacaccctcctcaagtgcctctgctatgcgaaacggacagaagaggctgtgtacgtgctgcttcataggatgtctgagctcggatgtgtgcctgatgccttctcatgctccattgttctgaagagcttatgcgacaacagcatgagtcagcggggccttgacctgctccagatgatggcgaaaggaggtggctgctccctcaatgtgggcata

SEQ ID NO: 2915 - DNA, 645 bp, Triticum aestivum
atgtcccacgtccgcctccacctccaccgccggctcctctcatccacctcgccgccctcacgttcctggtctccccgcgacgcctttgccgcgaccacagagcggctgcgcgccgggacgctctgtcgagacgatgcacacaacctgttcgacgaattgtttcggcaggcaatcccggtccccgaccgctccctgaacggcttccttgccgccctcgcccgtgctacgtcctctggcgcctgcatcagagatggccccgccctcttcaaccgcgtgtgccgagaacaagccggctcgcaggtggcgcctctcacagtccacacctacaacatcctcatggactgctgctgccgtgcgcgtcgcccagatctagggcttgccttgttcgggtgtatcctcaggacgggcttgaagatagaacaaatcaccgccaacaccctcctcaagtgcctctgctatgcgaaacggacagaagaggctgtgtacgtgctgcttcataggatgtctgagctcggatgtgtgcctgatgccttctcatgctccattgttctgaagagcttatgcgacaacagcatgagtcagcggggccttgacctgctccagatgatggcgaaaggaggtggctgctccctcaatgtgggcata

SEQ ID NO: 2916 - DNA, 645 bp, Triticum aestivum; identical to SEQ ID NO: 2915

SEQ ID NO: 2917 - DNA, 645 bp, Triticum aestivum; identical to SEQ ID NO: 2915

SEQ ID NO: 2918 - DNA, 645 bp, Triticum aestivum; identical to SEQ ID NO: 2915

SEQ ID NO: 2919 - DNA, 645 bp, Triticum aestivum
atgtcccacgtccgcctccacctccaccgccggctcctctcatccacctcgccgccctcacgttcctggtctccccgcgacgcctttgccgcgaccacagagcggctgcgcgccgggacgctctgtcgagacgatgcacacaacctgttcgacgaattgtttcggcaggcaatcccggtccccgaccgctccctgaacggcttccttgccgccctcgcccgtgctacgtcctctggcgcctgcatcagagatggccccgccctcttcaaccgcgtgtgccgagaacaagccggctcgcaggtggcgcctctcacagtccacacctacaacatcctcatggactgctgctgccgtgcgcgtcgcccagatctagggcttgccttgttcgggtgtatcctcaggacgggcttgaagatagaacaaatcaccgccaacaccctcctcaagtgcctctgctatgcgaaacggacagaagaggctgtgtacgtgctgcttcataggatgtctgagctcggatgtgtgcctgatgccttctcatgctccattgttctgaagagcttatgcgacaacggcatgagtcagcggggccttgacctgctccagatgatggcgaaaggaggtggctgctccctcaatgtgggcata

SEQ ID NO: 2920 - DNA, 747 bp, Triticum aestivum
atgccacgcgtgcgacccggctcgtcctccagcaccgtctcctcacgcgccaaccagctgctaaacaaactcaaggatcatctggactctgggacgctccagccggagcgcgcacaccaactgttcgacaaattgctgcgccaaaccgttccggtatcagcgtccgcactcaatggcttatttgccgccctcgcgcgtgcgctgccctccgctgcctgcaccgacggccctgctctagccattgctctcttcaaccgcatggctcgagagggccgccgggtgatagcacccaacatttacacctacagcatactaattgactgctgctgccgctcgcgccgccctgacctaggtcccgccttcttcgggttcctcctcaagacaggcatcaaggcggacatcatcaccttcaccagcctattcaagtgcctctgtcacatgaagcggatagacgaggctgtgggagtgctgcttcacaggatgcccggcgatatgcctgatgccatctcctactcaataattctcaagagcttctgcaatgaggggaggagccaacgtgcacttgacctgctccggatgatggccaaaaagggagctaatcactcccccgaagcatgcaccatagtaatctgtggcttaattaaggagggtgaactaagcaaagcatgctctctattccatgaaatgatgcagcagggggtcgtgcctagtgtggtagcatatagctccattatcgatgggttgtgc

SEQ ID NO: 2921 - DNA, 672 bp, Triticum aestivum
atggaaaaagctttgagagtacttgatgacatggcatccgctggcattgagcctaatgttgttacatatggtacacttgttgacggctactgtagaagtggaaggattgatgatgggttgatgctattcagagaaatgttgcataagagagttgaacctacaactgttacctataacatcatactgaatgggttatttcatgctgggagaacggttgctgcaaagatgttccatgagatgatcaaaagtggaataacagtgagcatttccacatacatgataatccatggaggactttgcaggaatagtcatgctgacgaagcgatcaccctgttccagaaattaggagcaatggatgtgaagttggatgttacaatactcaataccatgatcaatgcaatgttcaaggttcagagaagagaagaagctaacgatttgtttgctgcaatatctgccagtggattggtacctaatgcttctacttatggcaaaaatatacaaaatcttctagaagaaggatcattggaagaagctgacgatatgttttcatcaatggagaagagtggttgtgctcccagttcttgtcttttaaattttatcatcagaacgttattgaaaaagggggagatagtaaaggctggaaattatctctactcatataaaaagcacact

SEQ ID NO: 2922 - DNA, 672 bp, Triticum aestivum; identical to SEQ ID NO: 2921

SEQ ID NO: 2923 - DNA, 672 bp, Triticum aestivum; identical to SEQ ID NO: 2921

SEQ ID NO: 2924 - DNA, 672 bp, Triticum aestivum; identical to SEQ ID NO: 2921

SEQ ID NO: 2925 - DNA, 747 bp, Triticum aestivum
atgtcacgccgctataccatcacactgatctcccgcctccgagtcccccgccgctgctcctcctccacctccatctcgccgccctcacgctcctggtctccccgcgacgcctttgccgcggccacagagcgcgtgcgcgccggcacgctcagcccggaagatgcacacaacctgttcgatgaattgctgcggcagggcactccggtccccgagcgctccctgaacggcttccttgccgccctcgcccgtgctacgtcctccactgcctgcatcaaagatggccccgccctcgcccttgctctcttcaaccgtgtgtgcagagaagaagccagcccgcaggttgcagtgcccaccgtttgcacctacagcgtcctcatggactgctgctgccgcgcgcgtcgcccagacctagggcttgccttattcggctgcatcctcaggaagggcttgaagatagaccaaatcaccgccaacaccctcctcaagtgcctctgctatgcaaaacagacagaagaggctgtgtacgtgctgcttcataggatgtcggagctcagctgtgtgcctgatgccttcgcatacaacatagttcttaagagcttatgtaaaggtagcaggagccagcgggcgcacgacctgctccggacgatggcaaaagatagaggtggctgcttccctgatgtggtgacatataccacggtcatccatggctttttcaaggagggcgaaacaggcatgcaatctattcca

SEQ ID NO: 2926 - DNA, 666 bp, Triticum aestivum
atgttgtgcaagggacttaaaccaacaacttttaattacaacgtcatactggatggattatttctggctggacaaactgttgctgcaaaagagaagtttcatgagatggttgaatctggagtaactgtgtgcattgatacatactctatagttcttggtggactttgtagaaatagctgcagtagcgaagcgatcaccctgttccagaaattaagcgcaatgaatgtgaaatttgatattacaattgtcaatatcattattggtgccttctacagggtcgagagaaaccaagaggctaaggatttgtttgctgctattccagccaatggcttggttcctaatgttgttacctacaccataatgatgacaaatcttataaaagagggttcagtggaagaagctgacaatcttttcttatcgatggagaagagcggctgtactgccaactcttgcctgttaaatcatatcatcagaaggttactggaaaaaggagagatagtcaaggctggaaattatatgtctaaagttgatgcaaagagctactcacttgaagctaaaactgtttcacagctgatctctctgttttcaaggaaagggaaatatagagaacacatcaaattgctccctacaaagtatcagtttctggaagaagcagccacagttgaa

SEQ ID NO: 2927 - DNA, 534 bp, Triticum aestivum
atgccccatctccgcctccgccgcttctccaccgcgccgatgttccacctcctccactgcagctcctcctccacctccacctcgccgccctcgcgttcctggtctccccatgccgcctttgccgccgccacagagcgtgtccgtgccgggacgctcagcccagaagacgtgcaccacctgttcgacgaattgctacggcaggccaccccggtccccaggcgctccctcaatggcttcctttccaccctcgcccgtgcgcccgcctcggccgcctgcattagagccagccagcaggtggcacctttgacagtccacacctacggcatcctcatgggctgcttctgcggtgcgcgtcgcccggacctagggcttgccttattcggccgcttcctcaggacaggcctgaagacaaatgagatcatcgccaccaccttcctcaagtgcctctgctccgccaaacgtacagatgagtgtcggtgtcaaaaccggcggatctctggtagggggtcccgaactgtgcgtctaggcggatgg

SEQ ID NO: 2928 - DNA, 594 bp, Triticum aestivum
atgcactcaaatgaggcattggatctgctgctccaccggatgcccgaactggactgtgcgcctgatgtcttctcgttcaacatagtaatcaacggctgctttaragaagrtgaagtagacaaagcrtgcaatctcttccatgagatgccccaactgggagttcaacctgatgtggtgacctacacctcaatcatggacgcactaagcaagtccggagcaatggacaaggcagaagtgctccttcggcaaatggttgatcaaggaattgaacccaatatcaggacatatagctgtctgatccatggatattctacttttggtcagtggaaggaggcacttagggtattcaaagaaatggcaagtcttggtgttcgaccaaattctgtcacgttgaactcatttattgattccctttgcaagcatagaaagacaaagaaagctagagatatttttgactccatggccgcaaagggccacaaacctgatattttctcctactctactatgcttaattggtatgcgaaagaaggatgcttcgatgatatgactgatctcttcaattcgatggtacggaatggtatcgtacggaatgga

SEQ ID NO: 2929 - DNA, 459 bp, Triticum aestivum
atgcgccaacgagctgctgaacgaactccactccacggccatctgggcttcgggacactcaggccagatctcgcgcaccaactgttcgacgaaatgctgcgccaaccagtcccagtatcagtacgtgcactcaacggcttatttgctgcccttgcgcgtgcgccgccctccaccatctgcaccgatgcccctgccctcgccattgatctcttcaaccgcatggcccaagcaggccgtcgccaggtgccagcacccaccattatcacctacaacatactgattggctgctgccatcgagcatgccgcccggacctagggcctgccttcttcggtcgcctcctcaagacaggcatcaagacgaatgtcattacctacaacagcttactcaagtgcctctgtgacatgaagcgcacggaggaggctttgggcgctgctccacaggatgcccgacgacctgcc

SEQ ID NO: 2930 - DNA, 459 bp, Triticum aestivum; identical to SEQ ID NO: 2929

SEQ ID NO: 2931 - DNA, 459 bp, Triticum aestivum; identical to SEQ ID NO: 2929

SEQ ID NO: 2932 - DNA, 459 bp, Triticum aestivum; identical to SEQ ID NO: 2929

SEQ ID NO: 2933 - DNA, 732 bp, Triticum aestivum
atgccccgccgcatcccgctgccgatgccccgccgcatatgcatctggctccgctgctcctccccatcctcatcctgcacctatcccgactccggtctccgccacccgtcctgccttacctctacgttgtccggcctccgcctccgccgctccttcaccactccgatgtcgaacctccgcctcttccgccgcagctcctcctccacctccacccccacctcgcggtcctcacgttcatggtctccccacgcagcctttgccgcggccacagagcgtgtccgcgccgggacgatgaaccaagactacgcacacaacctgttcgacgaattgctgcggcaggccaccccggtccccgggcgctccctgaatggcttcctcgccgccctcgcacgtgctacgtcctctgccgcctgcatcagaaatggtcccgccctcaccgtcgccctcttcaaccgcgtgtgccgagaacaagccggcctgcgggtggcgcctctcacagtccacacgtacaacatcctcatggactgctgctgccgcgcatctcgcccggacctaggtcttgccttattcggccgctttctcaggacgggcctcaagacaaacgagatcgtcgccagcaccctcctcaagtgcctctgctacacaaaacggacggatgaggctctgaacgtgctgcttcataggatgtccgagctcggctgttgcctaatgccatctcatacaacattgttc

SEQ ID NO: 2934 - DNA, 732 bp, Triticum aestivum; identical to SEQ ID NO: 2933

SEQ ID NO: 2935 - DNA, 732 bp, Triticum aestivum
atgccccgccgcatcccgctgccgatgccccgccgcatatgcatctggctccgctgctcctccccatcctcatcctgcacctatcccgactccggtctccgccacccgtcctgccttacctctacgttgtccggcctccgcctccgccgctccttcaccactccgatgtcgaacctccgcctcttccgccgcagctcctcctccacctccacccccacctcgcggtcctcacgttcatggtctccccacgcagcctttgccgcggccacagagcgtgtccgcgccgggacgatgaaccaagactacgcacacaacctgttcgacgaattgctgcggcaggccaccccggtccccgggcgctccctgaatggcttcctcgccgccctcgcacgtgctacgtcctctgccgcctgcatcagaaatggtcccgccctcaccgtcgccctcttcaaccgcgtgtgccgagaacaagccggcctgcgggtggcgcctctcacagtccacacgtacaacatcctcatggactgctgctgccgcgcatctcgcccggacctaggtcttgccttattcggccgctttctcaggacgggcctcaagacaaacgagatcgtcgccagcaccctcctcaagtgcctctgctacgcaaaacggacggatgaggctctgaacgtgctgcttcataggatgtccgagctcggctgttgcctaatgccatctcatacaacattgttc

SEQ ID NO: 2936 - DNA, 732 bp, Triticum aestivum; identical to SEQ ID NO: 2933

SEQ ID NO: 2937 - DNA, 732 bp, Triticum aestivum; identical to SEQ ID NO: 2933

SEQ ID NO: 2938 - DNA, 732 bp, Triticum aestivum; identical to SEQ ID NO: 2933

SEQ ID NO: 2939 - DNA, 756 bp, Triticum aestivum
atgagggtgacatatagctccataatcaatgcgctatgcaaagcaagagcaatggataaggcagaggtgatccttcgacatatggttcataatggtgtccaaccacatgataggatatataataccctaatccatggatttttaactttgggtcagctgaaagaagcctttaggttgttgaaagtaatgagaagccaaggtagtatgccaaacggtgttacttgcacctcagtcatggactacctttgcaagcatggaagaatcaaagaagctgaggaaatattttattccatggccgtgaatggccgaaaaccagatatagtctcatactctattatgctccatgggtacgctatagaaggatcccttgttcaaatgattgatctctgtgagctgatggcaagagacggagttgtacccaacctccggtgtttcaacatactgattaatgcatatgctaagtatggcaggatggatgtggccatgcttttctttgaagacatgttgaagcagggtgtgaagcctaatgaattcacttatttaaccgtgatatctgcattttgcaagatgggcaggatggatgatgcgatggaaaagttcagtgagatgattgatatgggagtaccacttgagacagaagtttacatgtgcatggttgagggttattttaatcatggtgattccatgaaagccgaggaatttattaccaagatgaagaacagggatattcatcataagccatggaaaggtaatcga

SEQ ID NO: 2940 - DNA, 729 bp, Triticum aestivum
atgatgcagcaaggtgtcgagcccagtgtgtggacatatagttcaatcattgatgcattgtgcaaggcaagagcaatggacaaggcagagctagtgcttcagcagatggttaacaaaggtgttcaacccaataatgtcacatataattgcatgatccatggatattccacatctgggaggtggaaagaggctgctaaattgtttagagaaatgaaaagccggggccttataccagatacttttacttgcaacgccttaatgacttacctttgtaagcatggaagaagcaaagaagctgcagaaatttctgatgccatgactgccaaaggccacaagccggatatcgtctcatacagtattttgcttcatgggtatgccaatgaaggatgctttgctgatatgattgatctctttaattcaatggaaaggaacggcattgcagccgactgccatgttttcagcatattaatcggtgcgtatgctaaatgtgaattaatggatgaagctatgctcaaatttactcaaatgcggcgacaaggagtgagtcctgatgcgttcacatattcaactgtaatagtcgcactttgtagagtgggtaggctggctgatgcaattggcaaatttggtgagatgattgctatgggagtacagccggacagacctgtttatcgctccctaattcagggttgttttatgcatggtggcttggttaaagccacagctggtttc

SEQ ID NO: 2941 - DNA, 729 bp, Triticum aestivum; identical to SEQ ID NO: 2940

SEQ ID NO: 2942 - DNA, 729 bp, Triticum aestivum; identical to SEQ ID NO: 2940

SEQ ID NO: 2943 - DNA, 729 bp, Triticum aestivum; identical to SEQ ID NO: 2940

SEQ ID NO: 2944 - DNA, 729 bp, Triticum aestivum; identical to SEQ ID NO: 2940

SEQ ID NO: 2945 - DNA, 729 bp, Triticum aestivum; identical to SEQ ID NO: 2940

SEQ ID NO: 2946 - DNA, 675 bp, Triticum aestivum
atggttcataatggtgtccaaccagatgttgtgacatataatagcttgatccaaagatttttaacttcggggcagctgaaagaagccattaggttgttgaaactgatgacaagccaaggtattatgccagacgttgttacctgcaactcagtcatgacctaccattgcaagaatggaagagtcaaagaagctgccgaaatattttattccatggctgtgaagggccgaaaacctaatgtcatctcatactctattatgctccatgggtacgctatacaaggaccccttgttgaaatgattgacctctgtgagctgatggcaagagatggagttgtacccaacctccattgtttcaacatactgattaatgcatatgctaagtatggtaggatggatgtggccatgcttttctttgaagacatgttgaagcagggtgtgaagcctaatgaattcacttatttaactatgatgtctgcattttgcaagatgggcaggatggatgatgtgatggaaaaattaagtgagatgattgatatgggagtaccagttgacacagaagtttgcatgtgcatggttgagggttattttaatcatggtgattccatgaaagccaaggaatttattaccagaatgaagaacatggatattcatcataagccacggaaaggtaatcga

SEQ ID NO: 2947 - DNA, 675 bp, Triticum aestivum; identical to SEQ ID NO: 2946

SEQ ID NO: 2948 - DNA, 675 bp, Triticum aestivum; identical to SEQ ID NO: 2946

SEQ ID NO: 2949 - DNA, 675 bp, Triticum aestivum; identical to SEQ ID NO: 2946

SEQ ID NO: 2950 - DNA, 675 bp, Triticum aestivum; identical to SEQ ID NO: 2946

SEQ ID NO: 2951 - DNA, 651 bp, Triticum aestivum
atggaaaaagctttgagagtacttgatgacatggcatccgctggcattgagcctaatgttgttacatatggtacacttgttgacggctactgtagaagtggaaggattgatgatgggttgatgctattcagagaaatgttgcataagagagttgaacctacaactgttacctataacatcatactgaatgggttatttcatgctgggagaacggttgctgcaaagatgttccatgagatgatcaaaagtggaataacagtgagcatttccacatacaggataatccatggaggattttgcaggaatagtcatgctgacgaagcgatcaccctgttccagaaattaggagcaatggatgtgaagttggatgttacaatactcaataccatgatcaatgcaatgttcaaggttcagagaagagaagaagctaacgatttgtttgctgcaatatctgccagtggattggtacctaatgcttctacttatggcaaaaatatacaaaatcttctagaaggaggatcattggaagaagctgacgatatgttttcatcaatggagaagagtggttgtgctcccagttcttgtcttttaaatcagaacgttattggaaaagggggagatagtcaaggctggaaattatctctactcata

SEQ ID NO: 2952 - DNA, 651 bp, Triticum aestivum; identical to SEQ ID NO: 2951

SEQ ID NO: 2953 - DNA, 729 bp, Triticum aestivum
atgagccgccgcctcgtccccgtcggcagccgcctcttggagcggaacatcgagcaccgataccgctccagaaacattggtaccgaggacgcactcaacctgttcggcgaattgatccaggatcctgggcctacctcggtccgcgccatcaacggcctcctcaccgtcgtcggccgtgattgccccgcactcggcatctccctgttcaaccgtgttgcaagagccaaggtgcctccccacaatatcacctatggcattctagttgactgctgctgccgtgctggccgcttggaccttggacacgctgccatgggacacgtcattaagttgggatttgcagcagaagccatcgtcaatttcagccacctactcaaggccatctgtgcggagaagaagaccagctatgcaatggacatcgtactccgaataatgcccatgtttaactgcataccgaacattttctcctacagcattcttttcaagggtctctgcaacgagaagagaagccaagaggctctcgagctgattcacttgatggttgaggatggaggtagctgccaacctaatgtcgtgtcctataccaccgtagttgatggtttgttgaaagagggtgaggtaggcaaggcttacagcctattttgtgaaatgctacagaggggaatttcgccggatgatgtgacatataactcaatcatctctggcatgtgcaaggttcatgcgatggaaggc

SEQ ID NO: 2954 - DNA, 738 bp, Triticum aestivum
atggagaaaggaggtgtctgctcccctgatgtggtgtcatataccacggtcatccacggcctccttaaggaaggggaagtaagcaaggcatgcagtctgtttgatgaaatggtgcagcaaggggttgtgcctaatgtggtgacatacagctcgattattgatgcgctgtgcaaggctggagcgatggacaagacagagttggtcctttggcagatggttgatagtggcatccaaccggataacgtgacatatactagcatgatccacggatattccacgttgggccggtggaaagaagcaggcaaaatgttcagagaaatgacaagccggggtatcataccagatgttgttacttggacctcattcatgacctccctctgcaagcatggaagaagcagagaagctacaggaattattgattacatgtctgccaagtgccacaagcctaatatcgtcttgtactctattctgtttcatggatatgctacagaaggatgctttgatgatatgattaatctccttgactcgatggcaaacaacgctattgttcccaatcgccaggttttcagcattttagttgatgcatatgctaaacgtggaatgatggacgaagctatgcccatatttactggaatgtgtgaacaaggagtgatccgagatgtttacagatggggacaaggagtgagtccagagtctacagtaggtaggctggcggatgctttgaacaagttcgtcaga

SEQ ID NO: 2955 - DNA, 738 bp, Triticum aestivum; identical to SEQ ID NO: 2954

SEQ ID NO: 2956 - DNA, 738 bp, Triticum aestivum; identical to SEQ ID NO: 2954

SEQ ID NO: 2957 - DNA, 738 bp, Triticum aestivum; identical to SEQ ID NO: 2954

SEQ ID NO: 2958 - DNA, 738 bp, Triticum aestivum
atggagaaaggaggtgtctgctcccctgatgtggtgtcatataccacggtcatccacggcctccttaaggaaggggaagtaagcaaggcatgcagtctgtttgatgaaatggtgcagcaaggggttgtgcctaatgtggtgacatacagctcgattattgatgcgctgtgcaaggctggagcgatggacaagacagagttggtcctttggcagatggttgatagtggcatccaaccggataacgtgacatatactagcatgatccacggatattccacgttgggccggtggaaagaagcaggcaaaatgttcagagaaatgacaagccggggtatcataccagatgttgttacttggacctcattcatgacctccctctgcaagcatggaagaagcagagaagctacaggaattattgattacatgtctgccaagtgccacaagcctaatatcgtcttgtactctattctgtttcatggatatgctacagaaggatgctttgatgatatgattaatctccttgattcgatggcaaacaacgctattgttcccaatcgccaggttttcagcattttagttgatgcatatgctaaacgtggaatgatggacgaagctatgcccatatttactggaatgtgtgaacaaggagtgatcccagatgtttacagatggggacaaggagtgagtccagagtctacagtcggtaggctggcggatgctttgaacaagttcgtcaga

SEQ ID NO: 2959 - DNA, 738 bp, Triticum aestivum; identical to SEQ ID NO: 2958

SEQ ID NO: 2960 - DNA, 675 bp, Triticum aestivum
atgagccgccgccttgtccccgtcggcagacgcatcttggagcagagcatcaaggatcggtactactcggcaggcattggcaccgaggatgcactccagctgtttgacgaattgctcccggatgctgagccatccttgatccgtgccatcaactgcctcctcactgtcatcggccgtgattgccccgcgctcggcgtctcccacttcaaccgcgttgcaagggccaatgtggcacccaacagtatcacgtacaccatcctcgtcgactgctgctgccgtgctggccgcttggacctcggtttcgccgccatgggccacattattaagatgggatttacagcagaagctatcttcactttcaaccacctactcaaggccatctgtgcggagaagaagaccagctatgcaatggacatcgtactccgaataatgcctgagcttaactgcacaccgaatgttttctcctacaacattcttttcaagggtctctgcaacgagaagagaagccaagaggctctcgagctgattaacattatggttgaggatggaggtagctgccgacctgatgtggtgacctataacaccgtaattggtggcctgttgaaagagggtgtggtggacaaggcttacagcctattttgtgaaatgctaaaaggcagattttgccaaatgctg

SEQ ID NO: 2961 - DNA, 675 bp, Triticum aestivum; identical to SEQ ID NO: 2960

SEQ ID NO: 2962 - DNA, 675 bp, Triticum aestivum; identical to SEQ ID NO: 2960

SEQ ID NO: 2963 - DNA, 675 bp, Triticum aestivum; identical to SEQ ID NO: 2960

SEQ ID NO: 2964 - DNA, 675 bp, Triticum aestivum; identical to SEQ ID NO: 2960

SEQ ID NO: 2965 - DNA, 675 bp, Triticum aestivum; identical to SEQ ID NO: 2960

SEQ ID NO: 2966 - DNA, 666 bp, Triticum aestivum
atgacaaatcggagtgttacaccagatgtgtgtacttacaacttgttgatgacctccctttacaagaatggaaatagcaaagaagctgcacaattgttttattcaatggccacgaagggcctgaaacctgacaccgtttcatatgctattctccttcatgggtatgccactgaaggatgcttggttgacatgatcaatctcttcaattcaatggcaacagactgtattctacctaactgtcatatcttcaacatactgatttatgcatatgctaaatctgggaagcttgataaggctatgcttatatttaaagatatgcagaaacaaggagtgagtccagatgcagtcacatattcaaccgtaatacatgcattttgcaaaaagggtaggttggatgatgctgtgataaagtttaatcagatgattgatacaggagtacgaccggaagcatctgcttatcgttccctaatccagggtttttgtacacatggcgatttggtgaaagcaaaggaatatgttactgaaatgatgaagaaaggtatgcttcctcctgatattatgttcttcagttcaatcatgcagaaactatgcacagaaggaagggaaattatatatcgaaagttgatgcaaagagctactcacttgaagctaaaactgtttcgctgc

SEQ ID NO: 2967 - DNA, 717 bp, Triticum aestivum
atggttcatagcggtgttcgaccggatactgtgacatatactagcctgatccatggatattctactttgggccagtttgaagaggttgttaggttgttggaagaaatgagaagtctaggtgtcaaaccaaatgtttttacttgtaacacagtcatggactacctttggaagcatggaagaatcaaagaagctgcagaatttttttattccatggctgagaagggccataaacctaatatagtctcgtatgctattatgcttcatgggtacgctaaagaaggatcccttgttgaaatgagtgatctctgtgagctgatggcaagagatggtattgtacccgatctccgttgtttcaacatactgattaatgcatatgctaagtgtggaatgatggatgtggctattcttttcttcaaagacatgttgaagcagggagtgaaccctgatgaaatcacatatttagctgtgatagccgggtattgcagagtgggcatgatggatgatgctatggaaaatttcaatgagatgatcggtatgggagtaccacataacgcaactgtttacaggtgcatgattcagggttacttaaatcatggtgatttcttgaaagcaaaggaattgattactgaaatgaagaccaagggtatccatcctagaccgcggaaaagccaaggaattgatccagggtacctcatgacgcaactgtttacaggtgca

SEQ ID NO: 2968 - DNA, 651 bp, Triticum aestivum
atgtcccgcatccacctccaccgtcgcctcttctcctccaccacgcggcccttgcgttcctggtctccccgcgccgcctttgccgcggtaacagagcgcgtccgcgctggggcgctcagccaagacgatgcacaccacctgttcgacgaattgctgcggcaggccaccccggtccccgggcgctccctcgacggcttccttgccgccctcgtccgtgcgcccgcctccggagcctgcagagatgggcccgccctcgccctcgctctcttcaaccgcgtctgccgggatgaatccggcgcgcgggtggcaccgcccacaatcttcacctacggcatcctcatgaactgctgctgccgcgcgcatcgcccggacctagggctcgccttcttcgctcgcctcctcacgacgggcctgaaggctgaccagatcgccgccaacaccttccttaagtgcctctgttacgcaaaacggacggatgaagctgtgaacgtgctgcttcataggatgtccgagctcggctgtgtgcctaatgccttctcatactccattgttctgaagagcttatgcgacaatagcatgagtcagcgggcgctcgacctgctccagatgatgaccagatggagaaatgacaagtcagggtcttataccaga

SEQ ID NO: 2969 - DNA, 651 bp, Triticum aestivum
atgtcccgcatccacctccaccgtcgcctcttctcctccaccacgcggcccttgcgttcctggtctccccgcgccgcctttgccgcggtaacagagcgcgtccgcgctggggcgctcagccaagacgatgcacaccacctgttcgacgaattgctgcggcaggccaccccggtccccgggcgctccctcaacggcttccttgccgccctcgtccgtgcgcccgcctccggagcctgcagagatgggcccgccctcgccctcgctctcttcaaccgcgtctgccgggatgaatccggcgcgcgggtggcaccgcccacaatcttcacctacggcatcctcatgaactgctgctgccgcgcgcatcgcccggacctagggctcgccttcttcgctcgcctcctcacgacgggcctgaaggctgaccagatcgccgccaacaccttccttaagtgcctctgttacgcaaaacggacggatgaagctgtgaacgtgctgcttcataggatgtccgagctcggctgtgtgcctaatgccttctcatactccattgttctgaagagcttatgcgacaatagcatgagtcagcgggcgctcgacctgctccagatgatgaccagatggagaaatgacaagtcagggtcttataccaga

SEQ ID NO: 2970 - DNA, 651 bp, Triticum aestivum; identical to SEQ ID NO: 2969

SEQ ID NO: 2971 - DNA, 651 bp, Triticum aestivum; identical to SEQ ID NO: 2968

SEQ ID NO: 2972 - DNA, 651 bp, Triticum aestivum; identical to SEQ ID NO: 2969

SEQ ID NO: 2973 - DNA, 651 bp, Triticum aestivum; identical to SEQ ID NO: 2968

SEQ ID NO: 2974 - DNA, 603 bp, Triticum aestivum
atgacacgcctccactccaccatggcgtgcgcgtgccgcgtccgcatccgctgccgccgcctctcctcctccgccacctcgccgtcctcgcgctcctggtctccccgcgccgccttcgccgcgtccacagagcgcttccgcgccggcacgctcggccggccagacgcacaccgcctgttcgacgaattgctacggcgggacaccctggtccccagctgctccctgaacggcctccttcccgtgctcgcccgcgccacgtcctcggcatcctgcgtcacagatgggcccgccctcgccgtcgccctcttcagccgcgtgctccgagcggaagccggtccgtgggtggcgtgtcccacagtgtgcacctatggcatcctcatggactgttgctaccgtgtgcgtcgcccggacctaggacgagcctcaggacgggcctcaaggcagaccaggtcgtcgccaacaactcgctcaagtgcctctgctacgccaagcggaccgacgaggccgtcggcatgctgcttcatgggatgcccgacctcagctgtatgcctaatgccgtctcatacaacatttcgtaagaggttatctgaggatagaaggagc

SEQ ID NO: 2975 - DNA, 603 bp, Triticum aestivum; identical to SEQ ID NO: 2974

SEQ ID NO: 2976 - DNA, 603 bp, Triticum aestivum; identical to SEQ ID NO: 2974

SEQ ID NO: 2977 - DNA, 603 bp, Triticum aestivum; identical to SEQ ID NO: 2974

SEQ ID NO: 2978 - DNA, 603 bp, Triticum aestivum; identical to SEQ ID NO: 2974

SEQ ID NO: 2979 - DNA, 603 bp, Triticum aestivum; identical to SEQ ID NO: 2974

SEQ ID NO: 2980 - DNA, 708 bp, Triticum aestivum
atggactggccacctagcactggtacaacatggaaaagcactaaccgcatcgatcgtctcccactcgagtcgtcttgctcagcgttcacgacccacacatccaaggccatgcctcgcttctcctccaccccgccaatgtcgccaccccgcctccgcgtcggactcggcgccggccactcctcctccacctctcatccctcacgcatctgggatccccacgccgccttcgccgccgccacggagcgtgcgcgctctggcaacctcaccccggaggacgcacaccacctgttcgacgaattgctccggcagggcaatcctgtccaggagcgccccctcaacaaccttcttgccgccctcgcccgcgctccggcgtccgcggcgtgcagcgatggccctgcactcgcagtcaacctcttcagccgcatatcccaaggcgcccgccgacgtgtggcacacccaacggcctgcacctacagcatcctcatggactgctgctgccgcgtacaccgcctcgatctggcgttcgctttcttcgcccgtctcctcaggacgggacttaaggcaaaccaagtcatcttctgcaccctcctcaagggactctgccatgcaaagcgcacagatgaggctctggacgtgctgctgcacaggatgcctgagctgggctgcacccccaacgcggtggcgtataaccctatctcagtttgtata

SEQ ID NO: 2981 - DNA, 708 bp, Triticum aestivum; identical to SEQ ID NO: 2980

SEQ ID NO: 2982 - DNA, 729 bp, Triticum aestivum
atggattatctttgcaagagcggaagatgcggagaagctaggaagctttttgattctatgatcagtttgggccaaaaaccgacggttactacatacaacattttgctccatgggtatgccatggaaagatattttcatgatatgcattgtctcatcgatttgatggcagaaaatggcatttcaccggatcattatgtctacaacatactgatatttgcatatgctaaagaaaaaatggttggtgaggtaatgcatatatttacaaaaatgcggcaacaaggattcaaccctgatgcagcgagctatgggacgggaataaacttactttgcagcattggccgaatggatgatgctgtgttgcaattcaatcaaatggtaacggaaggattagctcctgatatcatagttttcaccacccttttgagtggtttttgttcttgtggcaaatgggagaaggtccatgaactattttctgaaatgttgaatcgtggaatctatcccaatgctgtgttcttcaacaaaattatgagccccctttgcaaaaatggaagggttatggcagcccaagatctctttgacctgatgatacacatgggtgtaaagccggacatgcatgcttataacacgatgatgggtggatacatgttcgttggcaagatggatgaagtgaggaagttacttgacaatatggtctcaactggcctggaaccagatattttcacatatgga

SEQ ID NO: 2983 - DNA, 729 bp, Triticum aestivum; identical to SEQ ID NO: 2982

SEQ ID NO: 2984 - DNA, 717 bp, Triticum aestivum
atgctattatgtatggtatacttcttaatgatcactgatggattgagtcttttcatggaaatgtcactcagcggggtgaagcccactactattatgtacaacattatacttgatgggctgttttgctctgggagaacagtttctgcaaaggaaaaatttgatacgatgattgaaagtggcataccagtgggcattgacacatacaacatagttcttagtggactttgtaaaaacaattgcactgatgaagcaatagagctattcaagaaattacgtgctatgaacgtgaagattgatgtcataactctcaataccatgatttctgcaatgtttaaaactaggagaattgaagaagccaaggatttgtttgctactatatcagccattgggttagtgccttctgttgtaacttacattttaatgataacgaatttcattaaagaagggctgctagcagaggctgatgatatgtttttagcaatggagaaggctggatgtgctccaaactccagtttgctaaatcaagtggtcagagtgttgctggaaaaaggtgcagctgtacaggctgcaacttatctggctaaaattgatgcaaaacatctgtcacttgaagcttcaacggtttcgttaataatatctctcttctcaaggaaaggggaactatgggagcatgtaaaattgcttccggtaaagtaccagcctcctgagatgttcgac

SEQ ID NO: 2985 - DNA, 717 bp, Triticum aestivum; identical to SEQ ID NO: 2984

SEQ ID NO: 2986 - DNA, 717 bp, Triticum aestivum; identical to SEQ ID NO: 2984

SEQ ID NO: 2987 - DNA, 717 bp, Triticum aestivum; identical to SEQ ID NO: 2984

SEQ ID NO: 2988 - DNA, 717 bp, Triticum aestivum; identical to SEQ ID NO: 2984

SEQ ID NO: 2989 - DNA, 717 bp, Triticum aestivum; identical to SEQ ID NO: 2984

SEQ ID NO: 2990 - DNA, 726 bp, Triticum aestivum
atgatgaacagaggtattcctcattctaacattccattcttcggttccgtaataaagaatctgtgccaagaaggaagggttatggacgcacatgaaatctttgacttggttatagacatgggtgagaggcctgatgacattttatttaattcactgattgttggatactgcttagtcgggaagatggataaagcattaaaagtacttgatgtcatggaatcagttggtgttgagcctgatgttattacatataatacacttgttaatggctattgtaaaagtggaaggatcgatgatggtttcgttctattcagagaaatgccgagtaagagagttaaacctgacactgttacatatggcatcatactggcagggttgtttcgtgcttggagaactgttgatgcaaggacaatgttccatgagatgatcgaaagtggaataacagtggacatcgtcacatacaatataattcttacaggactctgtagaaataattgcatagatgaagcgatcgccctgttccagaaattaggtgtaatgagtgtgaagttcaatattgcaatactaaataccatgatcgatgcaatgtacaaggtttggagaagagaagaagtcagtgatttatttgctgcaatatcagccagcactagtagaaaaacacctattagtcccggttcgttagggcctttagtcctggttcatgaaccgggactaatgggtcgttac

SEQ ID NO: 2991 - DNA, 678 bp, Triticum aestivum
atgggtaaggcagagttgttccttcggcgaatggttgataacagtgttcaaccggatagggtgacatatactagcatgatccatggatattccactttgggccggtggaaagaggcgacgaaaatgttcagagaaatgacaggcaggggccttataccaaatattgtcacttggaactcgttcatggcctccctatgtaagcatggaagaagcaaagaagctgcagaaattttcttttccatggctgcaaagggcaataagcctaatatcatcacctacggtattcttcttcatgggtatggcaatgaaggaagctttgttgatatgatgagtctctttaattcaatgaaaggcaacggtattgtggccaaccgccaggttttcaacatattaattgatgcatatgctaaacgaggactgatagatgaagctgttctcatacttactgaaatgcggggacacggactgagtccggatgtattaccgaaaaagggtttccccccgctttgtatacaaagcaaccaaccgaaccatacagagataggtgttggggcggaagcagcacagtcacgcccaaaagaaacgacagagaaagagcaaaagaaacaaatgccgacaacggcggatcaacaaaaacgaagaagcctcgcgatcgctgcacccaccgggatcttccac

SEQ ID NO: 2992 - DNA, 678 bp, Triticum aestivum; identical to SEQ ID NO: 2991

SEQ ID NO: 2993 - DNA, 678 bp, Triticum aestivum; identical to SEQ ID NO: 2991

SEQ ID NO: 2994 - DNA, 678 bp, Triticum aestivum; identical to SEQ ID NO: 2991

SEQ ID NO: 2995 - DNA, 678 bp, Triticum aestivum; identical to SEQ ID NO: 2991

SEQ ID NO: 2996 - DNA, 678 bp, Triticum aestivum
atgggtaaggcagagttgttccttcggcgaatggttgataacagtgttcaaccggatagggtgacatatactagcatgatccatggatattccactttgggccggtggaaagaggcgacgaaaatgttcagagaaatgacaggcaggggccttataccaaatattgtcacttggaactcgttcatggcctacctttgcaagcatggaaaaagcaaagaagctacagaaattttcttttccatggctgcaaagggcaataagcctaatatcatcacctacggtattcttcttcatgggtatggcaatgaagaaagctttgttgatatgatgagtctctttaattcaatgaaaggcaacggtattgtggccaaccgccaggttttcaacatattaattgatgcatatgctaaacgaggactgatagatgaagctgttctcatacttactgaaatgcggggacacggactgagtccggatgtattaccgaaaaagggtttccccccgctttgtatacaaagcaaccaaccgaaccatacagagataggtgctggggcggaagcagcacagtcacgcccaaaagaaacgacagagaaagagcaaaagaaacaaatgccgacaacggcggatcaacaaaaacgaagaagcctcgcgatcgctgcacccaccgggatcttccac

SEQ ID NO: 2997 - DNA, 555 bp, Triticum aestivum
atggttgaaagtggaacaacagtgagcatttcaacatacggtataattcttggagaactttgtaggaataattgcactgaggaagcaatcatactgttccacaaattaggtgcaatgaacgtgaagttcgatattacaatattcaataccatgattgatgcaatgtacaaggttcgaagaagagaagaagctaacattttgtttgctgcaatatctgccaatggattggtacctaatgcttctacctacagaataatgataacaaatcttttaaaagaaggatcaatggaagaagctgatcatatgttttcatcaatggagacgagtggttatgctcccagctccgttctattaaatgctatcatcagaatgttgttagaaaaaggtgagatagtcaaggctggaaattatttgtctaaagttgatgggaagagcatctcacttgaagcttcaactagtttgttgatgtggcatctattttcaacggaaggaaaatatcatgagcaaataaaatcactccctgaaaggtatcgatttttcggagtcagacacagt

SEQ ID NO: 2998 - DNA, 555 bp, Triticum aestivum; identical to SEQ ID NO: 2997

SEQ ID NO: 2999 - DNA, 555 bp, Triticum aestivum; identical to SEQ ID NO: 2997

SEQ ID NO: 3000 - DNA, 555 bp, Triticum aestivum; identical to SEQ ID NO: 2997

SEQ ID NO: 3001 - DNA, 555 bp, Triticum aestivum; identical to SEQ ID NO: 2997

SEQ ID NO: 3002 - DNA, 555 bp, Triticum aestivum; identical to SEQ ID NO: 2997

SEQ ID NO: 3003 - DNA, 555 bp, Triticum aestivum; identical to SEQ ID NO: 2997

SEQ ID NO: 3004 - DNA, 663 bp, Triticum aestivum
atgccccgcctccgcctccgtcgcttctccaccgcgccgatgttccacctcctccgccgcagctcctcctccacctccacctcgccgccctcgcgttcctggtctccccacgccgcctttgccgccgcgacggagtgtgtccgtgccgggacgctcagccctgaagacgcgcaccacctgttcgacgaattgctacggcaggccaccccggtccccgagcgccccctcaacggcttccttgccgccctcgcccgtgcgcccgcctcggccgcctgcattagagatggccccgcccttgccgtcgctctcttcaaccgcgtgtgccgagaagaagccggcctgcaggtggcagcgcccacagtttgcacctacaacatcctcatggactgctgctgccgcgcgcatcgcccggacctagggcttgccttctttggtcgtttcctcaggacaggcctgaagacagaacagatcaccgtcagcaccttcctcaagtgcctctgctacgccaaacggacggaagaggctgtgaacgtgctgcttcatgggatgtccgagctcggctgtgtgccgaatgcaatctcatactccattgttctgaagagcttatgcaagaatagcatgagtcagcgggcactcgacctgctctttcagtgtggtggcata

SEQ ID NO: 3005 - DNA, 663 bp, Triticum aestivum; identical to SEQ ID NO: 3004

SEQ ID NO: 3006 - DNA, 663 bp, Triticum aestivum; identical to SEQ ID NO: 3004

SEQ ID NO: 3007 - DNA, 534 bp, Triticum aestivum
atggacatggcacttcggataatgcccaagtttaactgcataccggatgttttctcctacaacattcttttcaagggtctatgcaccgagaaaagaagccaagaggctctagagctgattcacgtcatggctgaggatggaggtagctgccaacctaatgtggtgtcctatagcaccgtagttgatggcttgttgaaagagggtgaggtggacaaagcttacagcctattttgtcaaatgctaaagaggcgaatttcgccgaatgttgtgacctgtagttcaatcatctctgtcatgtgcaaggttcatgcgatggacaaggctgagcaggttcttcaacagatgtttgatacaagaattctgccaaatgttgctacatatactagtctgatacaaggatactattcattaggacactgcgaagaggtggattggattttcaagaaaatgtctagaaatggtgttcaaccaaatattgtagcttacaaacatacggatggattatctttgcaagagcggaagatgcgcataagc

SEQ ID NO: 3008 - DNA, 534 bp, Triticum aestivum; identical to SEQ ID NO: 3007

SEQ ID NO: 3009 - DNA, 534 bp, Triticum aestivum; identical to SEQ ID NO: 3007

SEQ ID NO: 3010 - DNA, 534 bp, Triticum aestivum; identical to SEQ ID NO: 3007

SEQ ID NO: 3011 - DNA, 534 bp, Triticum aestivum; identical to SEQ ID NO: 3007

SEQ ID NO: 3012 - DNA, 534 bp, Triticum aestivum; identical to SEQ ID NO: 3007

SEQ ID NO: 3013 - DNA, 591 bp, Triticum aestivum
atgacctccacgccgatgcgccggctcctcctctgtcgccgctcctcctcctcctccacctccacttcaccgccctcacgcccctggtctccccacgccgcctttgccgctgccacatggacgctcaccccgaaacacgcacaccacctgttcgacgaattgctacggcaggacactccggtccccgagcgctccctggacggcttccttgccgctctcacccgtgctagttcctctgcgtcctgcagagatggccccgccctcgcgctcgacctcttcagccacttgtgccgcgaagaagccggccctcgggtggcgccgcccacaatctttacctacggcgttctcatgaactgctgctgccgcactcgtcgctcgcaactggggcttgccttcttcggccgtctcctcaggacgggcctgaagacaaacacgatcgtcttcagctccctcctcaagtgcctctgccacgccaaatgggcagacgaggctgtcagcgtgctgcttcataggatgtccgagctcggttgtgtgcctgatgccttctcatacaccattgttcttaagagcttatgtgatgctagcagcagc

SEQ ID NO: 3014 - DNA, 591 bp, Triticum aestivum; identical to SEQ ID NO: 3013

SEQ ID NO: 3015 - DNA, 591 bp, Triticum aestivum; identical to SEQ ID NO: 3013

SEQ ID NO: 3016 - DNA, 591 bp, Triticum aestivum
atgacctccacgccgatgcgccggctcctcctctgtcgccgctcctcctcctcctccacctccacttcaccgccctcacgcccctggtctccccacgccgcctttgccgctgccacatggacgctcaccccgaaacacgcacaccacctgttcgacgaattgctacggcaggacactccggtccccgagcgctccccggacggcttccttgccgatctcacccgtgctagttcctctgcgtcctgcagagatggccccgccctcgcgctcgacctcttcagccacttgtgccgcgaagaagccggccctcgggtggcgccgcccacaatctttacctacggcgttctcatgaactgctgctgccgcactcgtcgctcgcaactggggcttgccttcttcggccgtctcctcaggacgggcctgaagacaaacacgatcgtcttcagctccctcctcaagtgcctctgccacgccaaatggacagacgaggctgtcagcgtgctgcttcataggatgtccgagctcggttgtgtgcctgatgccttctcatacaccattgttcttaagagcttatgtgatgctagcagcagc

SEQ ID NO: 3017 - DNA, 591 bp, Triticum aestivum; identical to SEQ ID NO: 3013

SEQ ID NO: 3018 - DNA, 591 bp, Triticum aestivum; identical to SEQ ID NO: 3016

SEQ ID NO: 3019 - DNA, 663 bp, Triticum aestivum
atgtcactcagcggggttaagcccacgactattatatacaacattatactggatgggctgttttgctctgggagaacaggttctgcaaaggaaaaattccatacgatgactgaaagtggcataccagtaggcgttgacacatacaacatagttcttagtggactttgtagaaacaattgcactgatgaagcaatagaactgttcaagaaactacgtgcaacgaacgtgaagattgatgtcatgacactcaatatcatgatttctgcaatgtttaaaactaggagaattgaagaagccaaggatttgtttgctactatatcagccatagggttggtgccttctgttgtgacttacagtgtaatgatgacgaatttcataaaagaagggtcgctggcagaggctgatgatatgtttttagcaatggagaaggctagctgtgctcccaactccatcctgctaaatcaagtggtcagggcgttgctggaaaaaggtgcagttgtaaaggctgcaacttatctcgctaaacttgatgctaaacagctgtcagttgaagcttcaacgatttcgttaatagtatctctcttctcaggggaagggaaactaagggagcacgtagagttgcttccagtaaagtaccagcctcctgagagttcgactgacaat

SEQ ID NO: 3020 - DNA, 663 bp, Triticum aestivum; identical to SEQ ID NO: 3019

SEQ ID NO: 3021 - DNA, 663 bp, Triticum aestivum; identical to SEQ ID NO: 3019

SEQ ID NO: 3022 - DNA, 663 bp, Triticum aestivum; identical to SEQ ID NO: 3019

SEQ ID NO: 3023 - DNA, 501 bp, Triticum aestivum
atgtatatgtttgacttcattctaggtattggtcagcggcctgatgtgattatgtacaattcattgatggatggatattgccttgttggcaaggtggaggaagcagtgagagtacttgatgctatgaagtctgctggcctccaacctactactgttacgtatggtatacttcttaatggctactgtaaaattggaaggatcgccgctggattgagtcttttcaaggaaatgtcactcagcggggttaagcccattactattatgtacaacattatacttgatgggctgttttgctctgggagaacagtttgtgcaaaggaaaaattccatacgatgaatgaaagtggcataccagtgggcgttgacacatacaacatagttcttagtggactttgtaaaaacaattgcactgatgaagcaatagagctgttcaaggaattacgtgctaagaacgtgaagattaatgtcatgatactcaatactatgattttttgcaatgtt

SEQ ID NO: 3024 - DNA, 501 bp, Triticum aestivum
atgtatatgtttgacttcattctaggtattggtcagcggcctgatgtgattatgtacaattcactgatggatggatattgccttgttggcaaggtggaggaagcagtgagagtacttgatgctatgaagtctgctggcctccaacctactgctgttacgtatggtatacttcttaatggctactgtaaaattggaaggatcgccgctggattgagtcttttcaaggaaatgtcactcagcggggttaagcccactactattatgtacaacattatacttgatgggctgttttgctctgggagaacagtttgtgcaaaggaaaaattccatacgatgaatgaaagtggcataccagtgggcgttgacacatacaacatagttcttagtggactttgtaaaaacaattgcactgatgaagcaatagagctgttcaaggaattacgtgctaagaacgtgaagattaatgtcatgatactcaatactatgattttttgcaatgtt

SEQ ID NO: 3025 - DNA, 501 bp, Triticum aestivum; identical to SEQ ID NO: 3024

SEQ ID NO: 3026 - DNA, 501 bp, Triticum aestivum; identical to SEQ ID NO: 3024

SEQ ID NO: 3027 - DNA, 501 bp, Triticum aestivum
atgtatatgtttgacttcattctaggtattgctcagcggcctgatgtgattatgtacaattcattgatggatggatattgccttgttggcaaggtggaggaagcagtgagagtacttgatgctatgaagtctgctggcctccaacctactactgttacgtatggtatacttcttaatggctactgtaaaattggaaggatcgccgctggattgagtcttttcaaggaaatgtcactcagcggggttaagcccattactattatgtacaacattatacttgatgggctgttttgctctgggagaacagtttgtgcaaaggaaaaattccatacgatgaatgaaagtggcataccagtgggcgttgacacatacaacatagttcttagtggactttgtaaaaacaattgcactgatgaagcaatagagctgttcaaggaattacgtgctaagaacgtgaagattaatgtcatgatactcaatactatgattttttgcaatgtt

SEQ ID NO: 3028 - DNA, 501 bp, Triticum aestivum; identical to SEQ ID NO: 3027

SEQ ID NO: 3029 - DNA, 618 bp, Triticum aestivum
atgacaggaagatgggacccacacactctcggctgtgcaactccaaactctcttcgctgcgtacgaacacggcggccgttccggacgccgcccagacgaagtctggtctctgactccgccattccttttctcctgacctccgcacctcgccgatgtcccgcctccgccgctcctccgccacgccgatctccagcctccacctcctccgccacatctcctcctccacctccacccccacccccacgtcgccaacctcacgctcctggtcaccccatgccgcctttgccgcggccacgcagcgtgtccgtgccgggacactcaggccggaagacgcacacaacatgttcgacgaattgcttcggcaggccatcccggtccctgaacggcttccttgccgtcctcgcccgtgtgcccgcctccggcgtctgcatcagagatggccctgccctcgcagtgtctctcttcaaccgtgtgtgcagagaggaagctggcccgcaggtggcgaggctcacagtttgcacctacaacattctcatggactgctgctgccgtgcgcgtcgcccggagctagggcttgccttattccgccgcttcctcaggaagggcctgaagacagac

SEQ ID NO: 3030 - DNA, 618 bp, Triticum aestivum; identical to SEQ ID NO: 3029

SEQ ID NO: 3031 - DNA, 618 bp, Triticum aestivum; identical to SEQ ID NO: 3029

SEQ ID NO: 3032 - DNA, 684 bp, Triticum aestivum
atggtgagcatcggcgagcatgcttgtcctcctaactctgctttccttcttcctaatcccaattcatgcccaggttgcgccggtgcggtggggggcgagcggcaccggcgtcctctgggtcctctgccattaccagattcttccagatccataggtggagctatgagccgccgcgccgtccccgctggcaggcgcatcttggagcagaacatcaagtcccggtaccgggctggagccattggcaccgacgatgcactccacctgtttgacgaattgctccaggttgcctggccctcctcgatcgccgccatcaactgcctcctcattgtcgtcggccgtgattgccctgcgctcgctgtctccctcttcaaccacatcgcaagagccaaggtggcgccccacaatatcacctacggcattctagtcgactgctgcagccgtgctggccgttggaccttggcttcgctgccatgggccacatcgttaagacgggatttgcggcaggatccgttgtctctttcagccacctgctcagggccgtctgtgcggagaagaagaccagctacggaatggacatcgtgctccgaattatgcctgagcttaactgcataccggatgtttactcctacaacattcttttcaagggcctctgcaacgagaagagaagccaagaggctctcgagc

SEQ ID NO: 3033 - DNA, 684 bp, Triticum aestivum; identical to SEQ ID NO: 3032

SEQ ID NO: 3034 - DNA, 684 bp, Triticum aestivum; identical to SEQ ID NO: 3032

SEQ ID NO: 3035 - DNA, 660 bp, Triticum aestivum
atgatttctactgatataaaaccggacacggttgtttatcactccctaattcagggtttctgcacacatggcgatttggtgaaagcaaaggagttggtttatgaaatgataaacaaagacattcctcctcctactattgtgctcttcagttcaataataaatagtctatgcaaagaaggaagggttacagatgcacaagatatcttcaacttggttattgaaataggtgagagtcctgatgtctttgcttttacttcactacttgacggatattgcctagtcggcaaaatggagaaagcatcacaagtgtttgatgcaatggtatcagctggcattgagcctaatgcatccacctacagcgtaatgataacaaatcttttgaaacaaggattagtggaagaagctgaaagtatgttctcatcaatggagaagagcggttgtgctccggactctcctcttatgaatgatatcatcagaatattattggaaaaaggtgaaattgttaaggctggagattatatgtctaaagttgatggcaggagcatctcacttgaagctacaactacttcattgttgaaatgtctcttttcaagcaaagggaaatatcgggaacaaataaatttgctccctgtaaagtaccagtttttcaatggagccagt

SEQ ID NO: 3036 - DNA, 660 bp, Triticum aestivum; identical to SEQ ID NO: 3035

SEQ ID NO: 3037 - DNA, 450 bp, Triticum aestivum
atgggatctggggtcctcccggtcgcccacacggggggcggctcgggagggggaactagtatatctctgattttgtcgtggcttttatgcactttaccacatttgtatatgtattggcctttgaccctcggtaaagcttacttgctcacttatccaacaattggcacgggagtacaaccgaacacagttgtttatcactccctagttcagggcttatgtacacatggtgatttggcgaaagcggaggagttagtttctgaaatgatgaataaaggtattgctcgtccaaacaaatcgttagcttcttcctttttgtatcattactccataagtggaagcattaggcgagttggtgccaaccctgcgtatatccgtgtatctatttgccagcatatatccgtgtgtgacaaccctgcggagacaatccgttgcagttgtcatccttctttt

SEQ ID NO: 3038 - DNA, 450 bp, Triticum aestivum; identical to SEQ ID NO: 3037

SEQ ID NO: 3039 - DNA, 450 bp, Triticum aestivum; identical to SEQ ID NO: 3037

SEQ ID NO: 3040 - DNA, 672 bp, Triticum aestivum
atggttcataatggtgtccaaccagatgctgtgacatataatagcttgatccaaggatattcaactctgggacagttgaaagaactcgttaggttgttgaaagtgatgagaagccaaggtgttctaccagatgttgttacctacaactcactcatgacctgcctttgcaagaatggaagattcaaggaagctgtagaaattttttattccatggctgtgaagggccaaaaacctaatgtcgtctcatactctataatgctccatgggtacgctatacaaggatcccttgttgaaatgattgacctctgtgagctgatggcaagagatggagttgtacccgacctccattgtttcaacatactgattagtgcatatgctaagtatggaaggatggatgtggctatgcttttcttcgaagacatgttgaagaaggggttgaaccctaatgaatttatttatttaactgtcatatctgcattttgcaagatgggcaggatggatgatgctctggaaaaattcaatgagatgattgataggggagtaccacttgacacaaaaatttacgtgtgcatgattgagggttatttgaatcatggtgaatctgtgaaagccgaggaatttattaccaaaatgaagagcagggatattcgtcatgggccgcggaagggtaat

SEQ ID NO: 3041 - DNA, 615 bp, Triticum aestivum
atgtctcgcctccgcctccgcctcccccgcggcagctcctcctccaccacagtgatcccccgcctccgactactccgccgctgctcctcctccacctccacctcgccgccctcacgctcctggtctccccgagacgcctttgccgcggccacgcagcgtgtccgcgctgggacgctcaggccggaagacgcacacaacctgttcgacgaattgcttcggcaggccaccccggtccccgagcgctccctgaacggcttccttgccgccctcgcccgtgcgcccgtgtccggcgcctgcatcagagatggctccgcccttgcagtgtctctcttcaaccgtgtgtgcagagaggaagccggcgcgcaggtggcggcgctcacaggctgcacctacagcatcctcatggactgctgctgccgtgcgcgtcgcccggacctggggcttgccttattcggccgcttcctcaagaaaggcctgaagacagaccagattgtcgccagcaccttcctcaagtgcctctgctacgcaaaacggactgatgaggctgtgaacgtggtacttcataggatgtccgagctcggctgtgtgcctaatgccttatcgacctgctccaga

SEQ ID NO: 3042 - DNA, 615 bp, Triticum aestivum; identical to SEQ ID NO: 3041

SEQ ID NO: 3043 - DNA, 615 bp, Triticum aestivum; identical to SEQ ID NO: 3041

SEQ ID NO: 3044 - DNA, 615 bp, Triticum aestivum; identical to SEQ ID NO: 3041

SEQ ID NO: 3045 - DNA, 588 bp, Triticum aestivum
atgtttcatcagatgatcaaaagtggaataacagtgcccgtttccatatacactataattcttagaggactttgtaaaaataattgcgctggcgaagcaatcaccatgttccaggaattacgtgcaatgaatgtgaagtttgatatcataacactcaataccatgattaatgccatgtacaaggttcagagaagagaagaagctaaaggtttgtttgctgcaatatcagccagtgggttgatgcctgatgcttatacttacaacgtaatgataaacaatcttctaaaagaaggatcagtggaagaagttgacaatatgttttcattgatggagaagagtggttgtgctcccagctctcatcttgtaaatgatatcatcagaaggttgttggaaaaaggtgagattgccaaggctggaaattatttgtctaaagttgatgggaagatcatctcacttgaagattcaaccatttcattgttgtcgtctcttttttcaagcaaagggaaatatcgggagaacatcaagttacttcctgcaaattatcactttttagatggatttagtggcattgcacatgagactaactcc

SEQ ID NO: 3046 - DNA, 588 bp, Triticum aestivum; identical to SEQ ID NO: 3045

SEQ ID NO: 3047 - DNA, 588 bp, Triticum aestivum; identical to SEQ ID NO: 3045

SEQ ID NO: 3048 - DNA, 588 bp, Triticum aestivum; identical to SEQ ID NO: 3045

SEQ ID NO: 3049 - DNA, 588 bp, Triticum aestivum; identical to SEQ ID NO: 3045

SEQ ID NO: 3050 - DNA, 588 bp, Triticum aestivum; identical to SEQ ID NO: 3045

SEQ ID NO: 3051 - DNA, 561 bp, Triticum aestivum
atggttgaatctggagtaagtgtgtgcattgatacatattcgatagttcttggtggactttgtagaaataattgtagcggcgaagcaatcatgctattccagaaattaagcacaatggatgtgaaattcaatattataattgtcaatataatgattgatgccttctacaaggttcagcgaaaccaagaagccaaggatttgtttgctgcagtatcagcgaatggtttggtagctaatgtctttacctacaccataatgatgaaaaatcttataaaagaagggtcagtggaagaagctgacgatctctttttatcaatggagaagagcggctgtactgctgactcttatatgttaaatcttatcgtcagaatgttacttgaaaaaggagagctagtcaaggctgggaattatatgtctaaagttgatgcaaagagctactcacttgaagctgaaaccgtttcgctgcttatctctctcttttcagggaaagggaaatatagagaacacataggattgctccctacaaagtatcagtttcgtgaagaagcggccgcagttgaa

SEQ ID NO: 3052 - DNA, 636 bp, Triticum aestivum
atgtcacgccgctataccatcacactgatctcccgcctccgagtcccccgccgctgctcctcctccacctccatctcgccgccctcacgctcctggtctccccgcgacgcctttgccgcggccacagagcgcgtgcgcgccggcacgctcagcccggaagatgcacacaacctgttcgatgaattgctgcggcagggcactccggtccccgagcgctccctgaacggcttccttgccgccctcacccgtgctacgtcctccaatgcctgcatcaaagatggccccgccctcgcccttgctctcttcacccgagggtgcagagaagaagccggcccgcaggtggcggtgcccaccgtttggacctacaacatcctcatggactgctgctgccgcgcgcgtcgcccagacctagggctcgccttattcgggtgtatcctcaggacggggttgaagatagaccaaatcaccgccaacaccctcctcaagtgcctctgctatgcgaaacggacagaagaggctgtgtacgtgctgcttcatagtatgtccaagctcggatgtgtgcctgatgccttcgcatacaacatagttcttaagagcttatgtgtgttaggaaagcaacttgtattcccatggcca

SEQ ID NO: 3053 - DNA, 636 bp, Triticum aestivum; identical to SEQ ID NO: 3052

SEQ ID NO: 3054 - DNA, 636 bp, Triticum aestivum; identical to SEQ ID NO: 3052

SEQ ID NO: 3055 - DNA, 636 bp, Triticum aestivum; identical to SEQ ID NO: 3052

SEQ ID NO: 3056 - DNA, 633 bp, Triticum aestivum
atgtcacgccgctataccatcacactgatctcccgcctccgagtcccccgccgctgctcctcctccacctccatctcgccgccctcacgctcctggtctccccgcgacgcctttgccgcggccacagagcgcgtgcgcgccggcacgctcagcccggaagatgcacacaacctgttcgatgaattgctgcggcagggcactccggtccccgagcgctccctgaacggcttccttgccgccctcacccgtgctacgtcctccaatgcctgcatcaaagatggccccgccctcgcccttgctctcttcacccgagggtgcagagaagaagccggcccgcaggtggcggtgcccaccgtttggacctacaacatcctcatggactgctgctgccgcgcgcgtcgcccagacctagggctcgccttattcgggtgtatcctcaggacggggttgaagatagaccaaatcaccgccaacaccctcctcaagtgcctctgctatgcgaaacggacagaagaggctgtgtacgtgctgcttcatagtatgtccaagctcggatgtgtgcctgatgccttcgcatacaacatagttcttaagagcttatgtgtgttaggaaaacttgtattcccatggcca

SEQ ID NO: 3057 - DNA, 633 bp, Triticum aestivum; identical to SEQ ID NO: 3056

SEQ ID NO: 3058 - DNA, 669 bp, Triticum aestivum
atgtcgcgcctccagccccgctctttctccagctccgcctcctcacgcgccaacgagctgctagacgaattcaaatatcatctgggctccgggacgctctggccggagctcgcgcaccaactgttggacgaattgcagcgccaacccgtcccggtttcagcgcgcgcactaaatggcttgtttgctgccctcgcggatgcgccgccctcggccaactgcacagatggccctgccctcgccatcaatctcttcaaccgccaccggatatcacctgacatttacacctacaacatactaattgagtgctgccaccgagcatgccgcccagaccttggacctgccttcttcggccgcctcctcaagacaggcgtcacaatgagtgtcattacctacagcagctatggcgaaagctttggggtggatcctctcccttccgcctcctcctcgagctatggcgaaagcttttgttcccctggtctgggcgtcgacggcaccctggtgtcgtgctccttcttgaaggcggcggctgggaacagctcttggtggcggggctgctggtggcgtggtggcttcggccttctacttggtgctgcgccttgcttcgcgggaccagcggacggtttctttggtggagcggtgctgcatccattcattgatggcgacggatct

SEQ ID NO: 3059 - DNA, 669 bp, Triticum aestivum; identical to SEQ ID NO: 3058

SEQ ID NO: 3060 - DNA, 669 bp, Triticum aestivum; identical to SEQ ID NO: 3058

SEQ ID NO: 3061 - DNA, 669 bp, Triticum aestivum
atgtcgcgcctccagccccgctctttctccagctccgcctcctcacgcgccaacgagctgctagacgaattcaaatatcatctgggctccgggacgctctggccggagctcgcgcaccaactgttggacgaattgcagcgccaacccgtcccggtttcagcgcgcgcactaaatggcttgtttgctgccctcgcggatgcgccgccctcggccaactgcacagatggccctgccctcgccatcaatctcttcaaccgccaccggatatcacctgacatttacacctacaacatactaattgagtgctgccaccgagcatgccgcccagaccttggacctgccttcttcggccgcctcctcaagacaggcgtcacaatgagtgtcattacctacagcagctatggcgaaagctttggggtggatcctctcccttccgcctcctcctcgagctatggcgaaagcttttgttcccctggtctggacgtcgacggcaccctggtgtcgtgctccttcttgaaggcggcggcggggaacagctcttggtggcggggctgctggtggcgtggtggcttcggccttctacttggtgctgcgccttgcttcgcgggaccagcggacggtttctttggtggagcggtgctgcatccattcattgatggcgacggatct

SEQ ID NO: 3062 - DNA, 267 bp, Triticum aestivum
atgaactgctgctgccgcgtgcgtcgtcccgacctagggcttgcctacttcggccgcctcctaaggaccggcctcaagacaaatgaggttgtcgccagcaccgtcctcaagtgcctttgcttcgcaaaacggacagacgaagctgtggacgtgctgcttcataggacgtctgtcctcggctgtgtgcctaattccttctcatacaacatagttctaaagagcttatgtgagacagcaggagccagcaagcgctcggcctgctcgagg

SEQ ID NO: 3063 - DNA, 660 bp, Triticum aestivum
atgccacgcgtccgacccggctcctcctccggcaccgtctcctcacacgccaaccagctgctaaacaagctcaaggatcatgtcggctctgggacactccagccggagcgcgcacaccaactgtttgacaaattgctgcgccaagctgttcccatatctgcgtgcgcactcaatggcttatttgccgccctcgcgcgtgcgctgccctccgctgcctgcaccgacggccctgctctagccattgctctcttcaaccgcatggctcgagagggccgctgggtgatagcgcccaacatgtacacctacaccatactaattgactgcagctgccgctcgcgccgccctgacctagggcccgccttcttcggccgcctcctcaagacaggcatcacggcggacgtctgcaccttcagcagcttattcaagtgcctctgtgacatgaagcggatagacgaggctgtgggagtgctgcttcacaggatgcccggagacatgcctgatgtcatctcctactcaacaatcctcaagggcttctgcaacgaggggaggagccagcttgcacttgatctgctccagatgatggtcaaaaaaggagctggccagtcacccgacgtggtatcatacaacatggtaatcaatggcttctttaaggaggtgaag

SEQ ID NO: 3064 - DNA, 660 bp, Triticum aestivum; identical to SEQ ID NO: 3063

SEQ ID NO: 3065 - DNA, 660 bp, Triticum aestivum; identical to SEQ ID NO: 3063

SEQ ID NO: 3066 - DNA, 660 bp, Triticum aestivum; identical to SEQ ID NO: 3063

SEQ ID NO: 3067 - DNA, 660 bp, Triticum aestivum; identical to SEQ ID NO: 3063

SEQ ID NO: 3068 - DNA, 660 bp, Triticum aestivum; identical to SEQ ID NO: 3063

SEQ ID NO: 3069 - DNA, 588 bp, Triticum aestivum
atgacacgcctctactccaccacggcgtgcgcgcgccgcgttcgcatccgctgctgctgccgcctctcctccaccacctcgccaccctcgcgcacctggtctccccgcgccgccttcgccgtggccacagagcacgtccgagccggcacgctcagccgaccagacgcacatcgcctgttcggcgaattgctacggcgggacaccccggtccccagccgctccctgaacggcctccttcccgtgctcgcccgctccacgtcctccgcgtacgtcccgcgtcacagatgggcccgccctcgccgtcgccctcttcaaccgcatgcgccgagcggaagccggcccgcttgtggcgcgtcccgcagtgtacacctcctcatggactgctgctgccgcgcgcgtcgcccggaccttgggctcgccttcctcggccgtctcctcaggacgggcctcaagacagaccaggtcgtcgccaacaacttcctcaagtgcctctgctacgccaagcggaccgacgaggacgtcgacgtgctgcttcataggatgcccgacctcggctgtgtgcctaatgccgtctcatgcaacatacag

SEQ ID NO: 3070 - DNA, 627 bp, Triticum aestivum
atgtctagaaatggtgttgaaccaactatgataacttacaatatacagatggattatctatgcaagagcggaagatgcatagaagctaggaagatgtttgattccatggtcagtttgggacaaaaaccgactgttactacctacaacattctgcttcatggatatgctatggaaagatcttttcatgatatgaattgtctcattgagttgatggattataatggtattaaaccagatcattatggctacaataaactcatatcttcatctgctaaaaaagaaatggttggtgaggtattgcatatatttacaaaaatgcggcagcaaggattgaaccctaatgttgtgaactatggaacggtaataaacttgctttctagtattggccgaatggatgatgctatgtcccaattcaatcaaatgataactgaagggttagctcctgatatcatagtttcaactcccttattagtggtttctgttcttgtggcaaatgggagaaggttcatgaactattttctcagatgttggatcgcggcatctgtccagacacagtgttcttcaacactgttatggatcacctttgcaaaaatggaagggttatggaagcccaagatgtgttcgacc

SEQ ID NO: 3071 - DNA, 627 bp, Triticum aestivum; identical to SEQ ID NO: 3070

SEQ ID NO: 3072 - DNA, 627 bp, Triticum aestivum; identical to SEQ ID NO: 3070

SEQ ID NO: 3073 - DNA, 624 bp, Triticum aestivum
atgtacaaaattatacttgatgggctgttttgctctgggagaacagtttgtgcaaaggaaaaattcaatacgatgactgaaagtggcataccagtgggcgttgacacatacaacatagttcttagtggactttgtagaaacaattgcactgatgaagcaatagagctgttcaagaaactacgtgcaacgaacgtgaagattgatgtcataacattcaataccatgatttctgcaatgtttaaaactaggagaattgaagaggccaaggatttgtttgctactatatcagccattgggttggtgccttctgttgtgacttacagtgtaatgatgacgaatttcataaaagaagggttgctggcagaggctgatgatatgtttttaacaatggagaaggctagctgtgctcccaactccagtctgctaaatcaagtggtcagggcgttgctggaaaaaggtgcagttgtaaaggctgcaacttatctcgctaaacttgatgctaaacagctgtcagttgaagcttcaacgatttcgttaatagtatctctcttctcaagggaagggaaactaagggagcatgtagagttgcttccagtaaagtaccagcctccggagatgtccgtc

SEQ ID NO: 3074 - DNA, 642 bp, Triticum aestivum
atgccacgcgcccgaccgggctcctcctccagctccgtctcctcacgcgccgaccagctgctaaataaactcaaggatcatctgggccctaggacgctccagccggagcgcgcacaccaactgttcgacaaattgctgcgccaaaccgttccggtatcagcgttcgcactcaatggcttatttgccgtccttgcgcgtgcactgccctccgctgcctgcaccgatggccctgctctagccattgctctcttcaaccgaatgaaccgagagggccaccaggtaatagcgcccaccaatcacgcctacaacatactaattgactgctgctgccgctcgcgcttcccgggcctagggcctgccttctttggccgcctcctcaagacaggcatcaaggcgaacatcatcaccttccacagcctattcaagtgccagtgtgacatcaagcagatggaggaggccctcaacaggctgctctacaggatacctgagctgcctgatagcatctcctactcaataattattaagagcttatgtgacaatgggaggagccaatgtgcacttgacctgctccggatgaaggcgaaaaagggagctgaccactaccctgaagtggtggcatacaacagggtggagccaatggct

SEQ ID NO: 3075 - DNA, 642 bp, Triticum aestivum
atgccacgcgcccgaccgggctcctcctccagctccgtctcctcacgcgccgaccagctgctaaataaactcaaggatcatctgggccctaggacgctccagccggagcgcgcacaccaactgttcgacaaattgctgcgccaaaccgttccggtatcagcgttcgcactcaatggcttatttgccgtccttgcgcgtgcactgccctccgctgcctgcaccgatggccctgctctagccattgctctcttcaaccgaatgaaccgagagggccaccaggtaatagcgcccaccaatcacgcctacaacatactaattgactgctgctgccgctcgcgcttcccgggcctagggcctgccttctttggccgcctcctcaagacaggcatcaaggcgaacatcatcaccttccacagcctattcaagtgccagtgtgacatcaagcagatggaggaggccctcaacaggctgctctacaggatacctgagctgcctgatagcatctcctactcaataattattaagagcttatgtgacaatgggaggagccaatgtgcacttgacctgctccggatgaaggcgaaaaagggagctgaccactaccctgaagtggtggcatacaacagggaggagccaatggct

SEQ ID NO: 3076 - DNA, 642 bp, Triticum aestivum; identical to SEQ ID NO: 3075

SEQ ID NO: 3077 - DNA, 642 bp, Triticum aestivum; identical to SEQ ID NO: 3075

SEQ ID NO: 3078 - DNA, 642 bp, Triticum aestivum; identical to SEQ ID NO: 3075

SEQ ID NO: 3079 - DNA, 642 bp, Triticum aestivum; identical to SEQ ID NO: 3075

SEQ ID NO: 3080 - DNA, 567 bp, Triticum aestivum
atgtcgccgctccgcctccggccccgcctccggccccgcctccatgcccgccgctcctactccacctcgcatcccccacgcagccagggctgggatccccacgccgccttcgctgctgccacggagcgcgcgcgatctggcaacctcacctcgaaggacgcacaccacctgttcgaccaattgctcctgcaggctaatccggtcaacatgcgccctccgaacgatcttctcaccgccctggctcgcgcgcctgcgtccgcagcctgcagcaacggccccgccctcgccgtcgccctcttcagccgtttgtcccaaggtgcccgccaacgggtggtgcagccaacggcctgcacccacggcatcctcatggactgctgctgccgcgcgaaccgccaggatctggcgctcgccttcttcggccgtctcctcaggacgggactgaaggcaggcgtcatagaagtcaacactcttctcaagggactctgccgcgcaaagcgggctgatgaggctctggacattctgcttcacaggatgcctgagcttggctgcacccctgacgtggtggcg

SEQ ID NO: 3081 - DNA, 567 bp, Triticum aestivum; identical to SEQ ID NO: 3080

SEQ ID NO: 3082 - DNA, 534 bp, Triticum aestivum
atgattgatacaggagtacgacagggcacatctgtttatggttctctaatccagggtttttgtacacacggcgatttggtgaaaggaaaggaattggttactgaaatgatgaacaaaggtataccacctcctgatattaagttcttccattcaatcatgcagaacctatgcacagaaggaagggtaatagaagcacgagatatccttgacttgatagcgcagataggtatgaggcctgatgtttgcacatttaatttactgatcggtggatacttcctagtccgcaagatagagcatacatcaaaaatatttgatgatatggtgtcatatggtttaaaaccttgtaatattacatatggtatacttattaatggctattgcaaaaatggaaggattgatcacgggctgattctgttcaaagatatgttgcgcaagggacttaaaccaacaacttttaattacagcccctcgcccctcgcgtcgcccccgtggaattcactcaattccaaaatattttatattttatatttgtac

SEQ ID NO: 3083 - DNA, 576 bp, Triticum aestivum
atggacaaggcagaggtggtccttcgacaaatggttggtaatggtgttcgaccggatattttcacatatactagcctgatccatggatattccatttcgggccagtttgaagaggtcgttaggttgttggaaaaaatgagaagtcaaggtgtcaaaccaactgtttttacttgcaacacagtcatggactacctttgcaagcatggaagaatcaaagaagctgcagaatttttttattccatggctgagaagggtcataaacctaatacagtctcatacgctattatgcttcatgggtacgctaaagaaggatcccttgttgatatgactaatctctgtgagctgatggctggagatggtatcatacccaacatctgtattttcaacatattgattagtgcatatgctaagtgtggaattatggatgtggctatgcttttcttcgaagacatgttgaagcagggagtgaaccctgatgaagtcacgtatttagctatgatagctgggtattgcagtatgggcagtatagtattagtaagtctgacgtgtgctaagatttcagaatataacagaagt

SEQ ID NO: 3084 - DNA, 576 bp, Triticum aestivum; identical to SEQ ID NO: 3083

SEQ ID NO: 3085 - DNA, 576 bp, Triticum aestivum; identical to SEQ ID NO: 3083

SEQ ID NO: 3086 - DNA, 576 bp, Triticum aestivum; identical to SEQ ID NO: 3083

SEQ ID NO: 3087 - DNA, 576 bp, Triticum aestivum; identical to SEQ ID NO: 3083

SEQ ID NO: 3088 - DNA, 576 bp, Triticum aestivum; identical to SEQ ID NO: 3083

SEQ ID NO: 3089 - DNA, 555 bp, Triticum aestivum
atgtcgccactgcgcctccgcctccgcctgcacgcccgccactcctcctccgcctcgcaaccctcacgccgccagggatgggatccccacgccgccttcgccgccgccacggagtgcgcgcgctccggcaacctcaccccggaggacgcacaccacctgttcaacgaattgctgcggcagggcaatcctgtcctggggcgccccctcaacaaccttctcgccgccctcgcccgcgcgccggcgtccagcgcctgcagagatggccccgcactcgcggtcgccctcttcagccgcatatcccaaggcgcccgcctaagggtgctgcacccaacggcctgcacctacggcatcctcatggactgctgctgccgcgcgaaccgccaggatctggcgctcgccttcttcggccgtctcctcaggacgggactgaaggcaggcgtcatagaagtcaacactcttctcaagggactctgccgcgcaaagcgggctgatgaggctctggacattctgcttcacaggatgcctgagcttggctgcacccctgacgtggtggcg

SEQ ID NO: 3090 - DNA, 555 bp, Triticum aestivum
atgtcgccactgcgcctccgcctccgcctgcacgcccgccactcctcctccgcctcgcaaccctcacgccgccagggatgggatccccacgccgccttcgccgccgccacggagtgtgcgcgctccggcaacctcaccccggaggacgcacaccacctgttcaacgaattgctgcggcagggcaatcctgtcctggggcgccccctcaacaaccttctcgccgccctcgcccgcgcgccggcgtccagcgcctgcagagatggccccgcactcgcggtcgccctcttcagccgcatatcccaaggcgcccgcctaagggtgctgcacccaacggcctgcacctacggcatcctcatggactgctgctgccgcgcgaaccgccaggatctggcgctcgccttcttcggccgtctcctcaggacgggactgaaggcaggcgtcatagaagtcaacactcttctcaagggactctgccgcgcaaagcgggctgatgaggctctggacattctgcttcacaggatgcctgagcttggctgcacccctgacgtggtggcg

SEQ ID NO: 3091 - DNA, 555 bp, Triticum aestivum; identical to SEQ ID NO: 3090

SEQ ID NO: 3092 - DNA, 555 bp, Triticum aestivum; identical to SEQ ID NO: 3089

SEQ ID NO: 3093 - DNA, 606 bp, Triticum aestivum
atgcctcgcttctcctccagcacgccaatgtcgccagcacgtctccgcctcctccgactctgcgcccgccactcctcctccacctctcatccctcacgcatctgggatccccacgccgccttcgccgccgcgacgcagcgggcgcgctctggcacgctcaccacggaggacgcacaccacctgttcgacgaattgctgcggcagggcaatcacgtccaggagcgtcccttgaataactttctggctgcccttgcccgcgcgcccgcgtccccattctgtagcgatggccccgccctggcggtcgccctcttcggccgtttgtcccgaggcgccggacgacgggtggcgcagccaaatgtcttcacctatggcgtcctaatggactgctgctgccgtgcgcgccgcctggatctagcgatcgccttcttcgcccgtctcctcaagacgggactggaggcaggccaagtcgttttcggcaccctcctcaagggactctgccatgcaaagcgctcagatgaggctctggacgtgctgcttcacaggatgcctgagctgggctgcatccctacaaagtatcagtttctggaagaagcagccacagttgaa

SEQ ID NO: 3094 - DNA, 606 bp, Triticum aestivum; identical to SEQ ID NO: 3093

SEQ ID NO: 3095 - DNA, 618 bp, Triticum aestivum
atgactgatctctgtgagctgatggcaagagacggtattgtaccctatctccattgtttcagcatattgattaatgcatatgctaagtgtggaatgatagatgtggctatacttttcttcaaagacatgttgaagcagggagtgaaccctgatgaagtcacatatttagctgtgatagccgggtattgcagagtgggcatgatggatgatgctatggaaaaattcaatgagatgattgatatgggagtaccacataacgcaactgtttacaggtgtatgattcagggttacttaaatcatggtgatttcttgaaagcaaaggaattgattactgaaatgaagaccaagggtatccatcctagatgcggaaaagccaaagaattgatccagggcagtagcggatcagtggacaacattccagtggctaggggtctacactacaccaaaattagtatgatggacaaacattgcactagtaaaactaaaactagtaaattgtttgtgggggccatgacccccatgaccccacccctagatccgccactgacccagggtacctcatgtcacaactcttttacaggtgcatgttccagggttgttttcatcatggtaattaca

SEQ ID NO: 3096 - DNA, 618 bp, Triticum aestivum; identical to SEQ ID NO: 3095

SEQ ID NO: 3097 - DNA, 618 bp, Triticum aestivum; identical to SEQ ID NO: 3095

SEQ ID NO: 3098 - DNA, 618 bp, Triticum aestivum; identical to SEQ ID NO: 3095

SEQ ID NO: 3099 - DNA, 618 bp, Triticum aestivum; identical to SEQ ID NO: 3095

SEQ ID NO: 3100 - DNA, 618 bp, Triticum aestivum; identical to SEQ ID NO: 3095

SEQ ID NO: 3101 - DNA, 561 bp, Triticum aestivum
atgttggatcgcagcatctgtcccgacagagtgttcttcaacactgatatggatcacctttgcaaaagtggaagggttatggaagcccaggatatcttcgacctgatggtacacatgggtgtgaagccttttgtccgtgattacaacacactgatacatggatactgtttagttggtaagatggatgaagggaggaagttacttgacaatatgtgctcaattggcttgaaaccggatgatttcacctatagcatactgattgatggttactctatgaagggaaggatagatgatgcattgattgttgtcagggaaatgttagacgggaaggttaaaccttctattatcactattaatattatgattggtgcattgcttaaaggtggcagaaaggaagaagccaaagatttgtttgatggtatctgggccaaaggattagtgcccaatgttgttacatatagcttaatgatacaaaaacttatagaagaaggttctctacaagagtctgatgatctattccttctatggagaagaatggatgtgctgccaactcccgtacac

SEQ ID NO: 3102 - DNA, 561 bp, Triticum aestivum; identical to SEQ ID NO: 3101

SEQ ID NO: 3103 - DNA, 483 bp, Triticum aestivum
atgttccaggaattaggtgcaatgaatgtgaagttcgatattataacactcaataccatgattaatgccatgtacaaggttcagagaagagaagaagctaaaggtttgtttgctgcaatatcagccagtgggttggtgcctgatgcttatacttacaacgtaatgataaacaatcttctaaaagaaggatcagtggaagaagttgacaatatgttttcattgatggagaagagtggttgtgctcccagctctcatcttgtaaatgatatcaccagaaggttgttgggaaaaggtgagattgccaaggctggaaattatttgtctaaagttgatgggaagatcatctcacttgaagattcaaccacttcattgttgtcgtctcttttttcaagcaaagggaaatatcgggagaacatcaagttacttcctgcaaattatcacgttttagatggatttagtcgcattgcacatgagaataactcc

SEQ ID NO: 3104 - DNA, 483 bp, Triticum aestivum; identical to SEQ ID NO: 3103

SEQ ID NO: 3105 - DNA, 633 bp, Triticum aestivum
atgataatggtatttcaccagatcattatggctacaacatactcatatctgcttatgctaaagaaaaaaatggttgatgatgtattgcatatatttacaaaaatgcggcagcaaggattgaaccctgatgttgcgaactatggagcggtaataaacttgctttctagtattggccgaatggatgatgctatgtcccaatacaatcaaatgataaatgaagggttagctcctgatatcatagttttcaactcccttattagtggtttctattcttgtggcaaatgggagaaggttcatgaactattttctgagatgttggatcgcggcatctgtcccaacacagtgttcttgaacacaattatggaccgcctttgcaaaaatgaaagggttatggaagcccaagatctcttcgacctgatggtacacatgggtgtgaagcctgatgtgtgtacttatagcacactgataggtggatacttgttcgttggtaagatggatgaagtgagcaagttacttgacaatatggtctcaattggcatggaaccagatgttatcacctataacatactgatgcacctcatatacctcatatatatccatcttgtctgttatgtcccatggacatatctcatt

SEQ ID NO: 3106 - DNA, 474 bp, Triticum aestivum
atggttgataatggtgttagaccggacaacgtgacatataatagcctcatccatggatattcctcttcaggccactggaaggacatggttaggttattcaaggaaatgaaaaatcggagtgttacaccagatgtgtgtacttacaacttgttgatgaactcccttcgcaagaatggaaaaaccaaagacgctgcagaaaattttgattcaatggcaatgaagggcctgaaacctgacaccatttcatatgctattatccttcatgggtatgccaccgaaggatgtttagttgatatgattaatctcttcaattcaatggcaacagactgtattctacctgactgtgatatcttcaacatactgattgatgcatatgctaaatctgggaagcttgataaggctatgcttatgtttaaagagatgcagaaacaaggagtgagtccagaactccagatgcagtcacatattcaaccg

SEQ ID NO: 3107 - DNA, 589 bp, Triticum aestivum
atgagatacacagtgagttcattcatccaactcgcgcgccaactgttcgacgaaatgctgcgccaaccagtcccaatatcggcgcgtgcactcaacggcttatttgctgcacttgcgcgtgcgccgccttcaaccgcctgcactgatggccctgcgctcgccgtcgatctcttcaaccatatggcccgagcaggccgccgctggatgacaggacccaccgtccacacttacaacatactaattgactgctgccaccgagcatgccgcccagacctagggcctgccttctttggctgcctcctcaagacaggcatcataatgagcgccattacctacagcagcctattcaagtgcctctgtgacatgaggcgcacaaaggaggctctgaacgtgctgctccataggatgcccgataacctgcctaatgtcatctcctactcagtgattctcaagagtttttgcgacagtgggaggagccagcttgcgcttgacctgctccgggtgatggccaaaaaaggtggtgaccactctcccgacgtgatggcatacaacatggtaagcaaagcatgcgatctattccacgaaatga

SEQ ID NO: 3108 - DNA, 978 bp, Triticum aestivum
gtgcagcgtgacccggtcgtgcccctctctagagataatgagcattgcatgtctaagttataaaaaattaccacatattttttttgtcacacttgtttgaagtgcagtttatctatctttatacatatatttaaactttactctacgaataatataatctatagtactacaataatatcagtgttttagagaatcatataaatgaacagttagacatggtctaaaggacaattgagtattttgacaacaggactctacagttttatctttttagtgtgcatgtgttctcctttttttttgcaaatagcttcacctatataatacttcatccattttattagtacatccatttagggtttagggttaatggtttttatagactaatttttttagtacatctattttattctattttagcctctaaattaagaaaactaaaactctattttagtttttttatttaataatttagatataaaatagaataaaataaagtgactaaaaattaaacaaataccctttaagaaattaaaaaaactaaggaaacatttttcttgtttcgagtagataatgccagcctgttaaacgccgtcgacgagtctaacggacaccaaccagcgaaccagcagcgtcgcgtcgggccaagcgaagcagacggcacggcatctctgtcgctgcctctggacccctctcgagagttccgctccaccgttggacttgctccgctgtcggcatccagaaattgcgtggcggagcggcagacgtgagccggcacggcaggcggcctcctcctcctctcacggcaccggcagctacgggggattcctttcccaccgctccttcgctttcccttcctcgcccgccgtaataaatagacaccccctccacaccctctttccccaacctcgtgttgttcggagcgcacacacacacaaccagatctcccccaaatccacccgtcggcacctccgcttcaag

SEQ ID NO: 3109 - DNA, 1014 bp, Triticum aestivum
gtacgccgctcgtcctccccccccccccctctctaccttctctagatcggcgttccggtccatggttagggcccggtagttctacttctgttcatgtttgtgttagatccgtgtttgtgttagatccgtgctgctagcgttcgtacacggatgcgacctgtacgtcagacacgttctgattgctaacttgccagtgtttctctttggggaatcctgggatggctctagccgttccgcagacgggatcgatttcatgattttttttgtttcgttgcatagggtttggtttgcccttttcctttatttcaatatatgccgtgcacttgtttgtcgggtcatcttttcatgcttttttttgtcttggttgtgatgatgtggtctggttgggcggtcgttctagatcggagtagaattaattctgtttcaaactacctggtggatttattaattttggatctgtatgtgtgtgccatacatattcatagttacgaattgaagatgatggatggaaatatcgatctaggataggtatacatgttgatgcgggttttactgatgcatatacagagatgctttttgttcgcttggttgtgatgatgtggtgtggttgggcggtcgttcattcgttctagatcggagtagaatactgtttcaaactacctggtgtatttattaattttggaactgtatgtgtgtgtcatacatcttcatagttacgagtttaagatggatggaaatatcgatctaggataggtatacatgttgatgtgggttttactgatgcatatacatgatggcatatgcagcatctattcatatgctctaaccttgagtacctatctattataataaacaagtatgttttataattattttgatcttgatatacttggatgatggcatatgcagcagctatatgtggatttttttagccctgccttcatacgctatttatttgcttggtactgtttcttttgtcgatgctcaccctgttgtttggtgttacttctgcag

SEQ ID NO: 3110 - DNA, 450 bp, Triticum aestivum
gcatccatggacgtggattgaattgaaggtgtactactgctgtgctggtccgtggatcgtggctgtcatgcatggtttgctgtgtcttctacgatatgtacttccctttgttccgtatatgtacatcttcctcgtttggttcatgtattttcctttgaataataataaataaatcgggctttccatatcggatgcttttatatctgtgtgtatggagattgtggtatatggtttcatctcaagttgtttacgtcaagaactaaagatatttcctcaaaaaaaaagaactaaagatataatcaatgtcattaacataactcatttccatgaggagaggacgaaggacgaagtcataataagtagattggttgatattttataatcattcaaaactgcaggggttataagatcttcattttgtagaagttttagatcttccgaggggttctc

SEQ ID NO: 3111 - DNA, 864 bp, Triticum aestivum
tgatgcaccggactagacagataaacattggcatggtttggagctctctctcaatgatgtcgacatgagttctgttccatgtgctcacaagatcgagctgagtgttcgtgttaccatagcgttttggcccgatgcatgcggctgctgggcgtgcatcctatggacatcgcccctaatctgcatgccatttccatgctcaaggttcgcatcctctcttcctcttaataatatgccagggctgttactaccccagggccttttcctctttattctccttttactttttgaggtcttcatgtttatagttagatgcctgtcattatacaccagaaaaactgtaagagttcctgaactagataccgtcataccgaacaagataacaacattaaacattcttaatacattttcttggtgcagatgtttatgtgatgacgtatgatcttaatctggaaagatctcttgtaggcatgccttgatgttgtttttccttatgttcgctagagggagcaatgtggccatccagttggcgaatttcacgttttcttctccactgatagcacaacctaagttgcacttgttatgaagatctttaattcattccatatgaatttgtcgcatatgttgttcctttttatgaattatatttatttggaattcgatcaagtaccgtagaatgtcgcccatctttggacagataactgttgacgtctcgaattttgcatttgtgtctccaagcactcttattttatcttccttgggcaaagttcttgttacattatgcacttgtgtcatccaagcactctcattttatcttccttgggaaaagttcttgctacattatgcacttgtgtcatccaagcagtc

SEQ ID NO: 3112 - DNA, 1000 bp, Triticum aestivum
tgcaaagagctactcacttgaagctaaaactgtttcgctgctgatctccctcttttcagggaaagggaagtatagagaacacataaaattgctccctatgaagtatcagtttctcgaagaagcagccacagttgaatagtttgatacatgatctctgaactcaactcctagaagttaacttggattgttgcttgccatgggtccttatgcttgtacaacaaatgcattttctgtttggtaaatagaaagccagtcctaaattctgtcactttttgttaagttcgtgatgcgctgaaataactatttttttccgttagttattgtgagtagtatctgaaatttcctatatttttgtttctcaggcttatcacaatctcagtattatagtttctgcagttagtgaaagaagatctatttctagtaacatgaaagcttccataaggcttgtgttccacttctcacttgctgttttgaggctgcttgcatacattttggtcgtttctttgccacttggtaagtataattgcaactgcataatactttttctatattgtacaattcacattcagttactggaaaacttgtgccccttgtgaggattctgagtgtctttgcttcactgcttcagatatatgatatcgtcaaatattggtaaagttttgggcacttggagatgccggacttcatcattgtcaaggcttctatctgaaaattggactactgcatccgcgaggatcctgcgggcactgactgtgctcttgatagaatgctggcaacggcatggttggccgcacagagaaggagtctacctgatgaaatgcagagagcaagactatgtccaattcagaggtgttgtgcatcaaattgattttaaatgaatacacgtgctcaggtcgaaggtgaagctgggatggcactatgttttgtcatgaaaaggtgttaaggctgaaaagggaatccattgactatgtttcattgagctctgaaggtcataaggatt

SEQ ID NO: 3113 - DNA, 2500 bp, Triticum aestivum
ggtggcggcccccctttcctgcctttggtcattcgtctccgcgcaggtcggctgctctggccggcccttggtggttgctgtagtgctgcggcaagggggtgccagatccatcggttcttcattcggatccagctcgtctcttgccttactcagggtcggtcaccccgtgaccttgcctgcggcagtgagggggtgtgcgtgctctgtgatgggccttgtgaggcgatggcgcgcttgctgcgcaggggtgtgcgggccaacttgtgtcggctgcgtgagggtgttggttgagtctgctccaagcgcaagcttgcccggctatggccggccggtggtggcggcgcctacgggtgtcgtttcccttgttgaaggcgttgttgtggagttcttcgacctactacaatctcgaatctggttcttcgggcgaaagccttgccccatctgggtcgggcaacgacgtcgtccgtacgatgttttccccctttggggcgttgctttgaaggccggttaacctttcccgtgctacctttgggttggtcgtgcatggtgtcatggttggctggtgctcaaccggtgatgcgagtggttggcgttgcgactcgtgcggcgacgaagatggtgatgtgcagagctgggtcgcggcttgtccttctgatgtcggcggttcgattcccctttgggtgcatctgtgcttgtttctcactatgacagagaagttgaagctgcatgcagcggggcccttgcagcaatgatgactccatgagggtggtttcggcagacggtgctctccgtaggttgcactggactagcttggtgcgaggcttgcaactttctcctgtgatgctcatcaacaaaatcggagctgtcggtcctcgacgcctgcggccgatcatttggcttggctgtcgaggtcatcgggtgtcgtttgttcagaggggtcttgatgggtcgtcagcgaggaaaccagagttgcctgctcgcggagaggcgatgacgatgacattgcttgcagcctcgacggtgtcctctcctcagcggtatgtgtgtggtcttgtcagtgccaggtcggccggagcgtcctattcgatgggcgtgttttaattaaccgagcaactctcttcttcttaatcaatgaaaatggcaagtcttttacctcgtttcaaaaagagttagatgcactggaggtatcgagatgtcagtttagtcctatgtcttccaaaatgcgcctttaggtcctaattctttcttaattggttcacccgaggtccttttccacgaccactcgctgaccagcccacgtgccgcattgacccacgccacgtcgacagagggtccaaccgccaggcgagaagcttcgcaaagagacaccccccctcttagtggcacccctctcctctttcacggtactttggcgacattggaggcgagtggcagaggcaaccggaggtgatctggaggcaatctgagtgggtgcccgtgaagatgccccttctatgacggccagtgagcggtcctcctccatgttaccgtgagaaccctaatcttgtcgatgctcttctcctgtagctcttctattatgccataactctgccataatcaatagttgtagtccttgatttacttcgatttgcataacggtgctacggacacggcaaaaaagacacaccaccagcggcaacatactcgccgaagttggagcttgcttcgccgcgccggtggcggtgctgacgatgctgccatgctcctcatcttcagttgtttccttgccgaggagcttgaagttccggccatggataggtttagggcacacgagagagcagatttggggaagaaataaagccagggactggggaatgagaaggtaatgttcataaggggttttctgtaaaaagaaagagcaacctaagcggcccctttgtcgacttggcgtgggtcaatgcgccacataggcaggtcaatgagcgcttgtgagaaaaaggtcctcgggtaaaccacttgcttaaagaattactccctccgtcctataatataagaacgtttttgacactcactagtgtagtgtcaaaaacgtttttatattatgggacggagggagtagtacctaaaggtgcattttggactaaataagactaaagtgacaccccgacgaaacttttaggacctcgagtgcatttaactcttaaaaaaacaaagatgctaaaaaaactaaatgcttaaaaatatatttttctatgggaatacttaaaaatactattataattttatggcttcctagtatatttctagggcttacaactaaatttatattcttggtctaaataaaattataatctgataaattatgtgatatgaatatgtcatatagccatatgagaccataatttaattttacctgcaaaaaataagtaatagtagtagtactactagataagataacttggtaaagcactagccccgtcgtctcccagttcaggatctacctacactgcacaccaaggcc

SEQ ID NO: 3114 - DNA, 2178 bp, Triticum aestivum
gtaggatgtgtgcggggtgattggaagatccaactataaatattattgatactctcttaaaagatgggatggtgatcaccttgcaataaagagttattttttcgcgaatagcaataaagagttatttgatggcaaaaaaaaatcagatgatgtgggctggcctaggatatatagatatataacacttccccttttatattagaatacttaaacatttcgtacattgcatgttgttatatagcctgcaaaaaaggctttcgcgctgctttatataaaaagcaacatagtcaaactgatgtatggtgatgagaagatcgtcttataaaacagatcatatggaaaaacaagaaaacaatagagtgcacaccctatcacaaaacaatctagactacaactagggggagacttgcaccaagggaaaacgcatgacctcgttgcgcaactcgtaccaaggtgacaccagagagagcccctaccctcccgctcctgatcgtggagcctaagcctgcttgcggacaacaaggatcgcgatggatgccaataagggctcgtgtaaaaagataaggaggaaaaacgacagcccacgcgcgaagccaaggaaacttcgatccagcatccgaacatgcctgccaattggcgacacggtgcaccgaaggtaacctaggccccatgacgacgcccacaggagggagacgacgtaaggagtcgccatcgtcaaaaccgaagagacaatcaagggttttcatccggagccctggctccaagagagggaccacatcgacggccccaagagagatgcgacacccatgtgcatcactgccactagtgtcgaagcacaaggctttcgcctagagcctcttacaggcgtcacatcgaggaaccccgagcatcagcccacccgagggaagagatatcactaccaaacaaggcctccatggttctgggagccgtcactgccgaggcaccaccgacaccgggatcaccaagcgtggcatcctttgccatccacacaaccaaaagatgtccccaccaccgctgccaaggcgcctgctgaaaagccgctctgacggtccgccaccctaggccgccgctccggcgtccaatatcccaacctcgactccacacgcgggcaccaacccccgaaaaccgcactcaccggtggtgacacggaaagcgaaactactccatgcacgacgttcagtgaacgatctctggacgacaaggaatcaaatggctggagctgtactttgtctattcatgatcggtgtgatcaatagcgtcgtccacagatcgggcaaaggccgtcgtccgcataacatcgctccatggaaaggctcttcctttccagtcccacggcacaccacgccgacaccagcaccatctgcggcggtgaccactgaccagcgaacctaactcggtcaaggagaccaaacctggctgggagcacgctaccccatctgcctccaccccacagcacgagcacgggtgtccattcaggtacaacaggggatccacatcagaacatctccaacaatttgtatgttagtttgttggtaaaatatgccatgtcatcaaccaacaccgtaacatacaacaacttcaatggattatatctagcctgcccaatagaatgtgagataataaataaggtgctctctcattctacattggagcttgtgcaaggagtgttgattcatgtacatacaaccttcttctctttcttcatttattgtatgacacatcatcaaaaattctactacaccctttccgatttataaggcatgcacgtatccctaggtttataatttgagcaatataaaataagttgtatattctaaaaattacaccattagaaagtagaaaatctgaaatttttaataatatattttttgtgacaaatagcttgttttacgttggtttatttgtcaacctagatatacgtgcaagccctataaatcggaaaggaggtagtatgtgacaaagtctaccaagaaatatcttataactattgagatgcccttagcgagagctggctgccgattgactgatgaatgaacaaaaatcctatatgacaaagtctaccaagaactattttataactattgccgattgactgatgaatgaaccgttaccgtcttcttgtacagaagtaaacacttgtatacctccaccgccccg

SEQ ID NO: 3115 - DNA, 2472 bp, Triticum aestivum
atgtccaggctccgctccgccagcaccgccccaatgccacgcctgaggctcctgagctgcaggagctactccatcagcaccctgccaccaagcaggtcctggagcccacacgccgccttcgccgccgccaccgagagggtgagcgccggcaccctcaccccagaggacgcccaccacctcttcgacgagctcctgcgccaaagcaccccagtgccagccaggagcctaaacggcttcctcaccgccctggccagggccagggacaccgacgcctgcagggacggcccagccctggccctcgccctgtttaacaggaccaggcgcgaggaagccggctcaagggtcgtgagcccaaccatctttacctacggcatccttatgaactgctgctgccacaccctccgcccagacctgggcctcgccttcttcggcagggtcctcaggatgggcctcaagaccaacgtcgtggtcgccaccaccgtgctgaagtgcctatgcggcgccaagaggaccgacgaggccgtcaacatcctcctgcataggatgtccgagctgggctgcgtcccagacgacttcagctactcaatcgtgctcaagtccctgtgcgacgacggccgctcccaaagggccctggacctcctccaaatgtgggagaaggagaggggcgtctgctccccaaacgtcgtggcctacaacatcgtgatccacggcttcttcaaggaaggcgaggtctccaaggcctgcgacctgttccacgccatggtgcaaaggggcgtcgtgcctaacgtcatgacctacaccctcaccatcgacgccctctgcaaggccagggccatggacaaggccaagctgttcctcaggcagatgatcgacaagggcgtgaggccaaacaacgtgacctacaacgtgatgatccacggctactccaccctgggccagtggaaggaagccggcaaggtgttccgcgagatgagccgccagggcctgatccctgacatcgtgacctggacctccttcatggccagcctctgcaagcacggcaggaccaaggaagccgccaacttcttcgacagcatgaccgccaagggccacaagccagacctggtcacctaccacgtgctcctgcacggctacggcaccgagggctgcttcgccgacatgatcaacctcgtgaacagcatggccaccaagggcatcgtgccagataggcaggtcttcaacatcctgatcgacgcccacgccaagcacggcatgatggacgaggccatgcacatcttcaccggcatgcaaggccagggcgtctgcccagacgtgtggacctactccaccatcatcagcgccctctgccgcatgggcaggctggccgacggcatggacaacttctcccaaatgatcggcaagggcgtggagcctaacaccgtcgtgtaccactccctcatccaaggcttcagcacccacggcgacctccgcaaggccaaggagctggtgtacgagatgaggaacaagggcatcccatgcccaaacatcgccttcttcacctccatcatggacagcctgtgcaaggaaggccgcgtcatggacgcccacgacatcttcaacctcgtgaccgacatcggcgagaagccaaacgtcatcacctttaacaccctcatcgacggccactgcctggtgggcgagatggagaaagccttcggcgtgctcgacagcatggtctccgccggcatcgaggccgacgtcttcacctacaacaccctggcctacggctactgccgctgcggcaggatcgacgacggcctaatcctgttcagggagatgctccgcaagaagccaaagccaaccaccatcacctacaacatcatcctggacggcctcttcagggccggcaggaccgtggccgccaagaaaatgttccacgagatgatcgagggcggcatcaccgtgtccatgagcacctactccatcatcctcggcggcctgtgcaggaacaactgcgccgaggaagccatcaccctgttccaaaagctgggcgccatgaacgtgaagctggacatcaggatcctcaacaccatgatcaacgccatgttcaaggtccgcaggcgcgaggaagccaacagcctgttcgccgccatcagcgcctccggcatggccccaaacgcctccacctacggcctcatgatcggcaacctgctcaaggaaggctccgtccaagaggccgagaatatgttctccctcatggagaagtccggctgcgccccaggcagcaggctcatcaacaacatcatccgcatcctcctggagaagggcgacatcgtgaaggccggcaactacatgtccaaggtggacggcaagaccatctccctggaggcctccaccaccagcctgctgatgtgcctcttctccagcaagggccgctacagggagcagatcaacctgctcccaggcaactaccaattcttcaacggcgtctcctga

SEQ ID NO: 3116 - DNA, 2469 bp, Triticum aestivum; identical to SEQ ID NO: 1781

SEQ ID NO: 3117 - DNA, 2226 bp, Triticum aestivum
atgcctcgcttctccaccaccacgccaatgtcgccaccccgcctcctcctccgactcggcgcccgccactcctcctccacctctcatccctcacgcatctgggatccccacgccgccttcgccgctgcgacgcagcgggcgcgctctggcacgctcaccacggaggacgcacaccacctgtttgatgaattgctgcggcagggcaatcctgtccaggagcgtcccttgactaactttctggctgccctcgcccgcgcgcccgcgtccgcattctgcagcgatggccctgccctggccgtcgccctcttcggccgtttgtcccgaggcgccggacgacgggtggcgcagccaaatgtcttcacctatggcgtcctcatggactgctgctgccgtgcgcgccgcctggatctagcgatcgccttcttcgcccgtctcctcaagacgggactggaggcaaaccaagtcatcttctgcaccctcctcaagggactctgccacgcaaagcgctcagatgaggctttggacgtggtgcttcacaggatgcctgagctaggctgcacccccaacgtggtggcctataccacggtcatccacggcttcttgaaggaaggccaagtaggcaaggcatgcaatctattccatggaatggcgcagcagggcgttgcgcctgatgtggtgacatataactcggttatcgatgcgttgtgcaaggccagagcaatggacaaggcagagtatttcctttgtgaaatggttgataatggtgtcgtacctaataatgtgacatataatagcctcatccatggatattcctctttgggccatcagaaggaggctgttagggtgctgaaagaaatgacaagacagggtatcataccagatgtcattacctgcacctcactcatgaccttcctttgcaagaatggaaaaagcaaggaagctgcagaaatttttgattcaatgcccacgaagggcctgaaacatgacgccgtttcatatgctattctccttcatgggtatgccactgaaggatgcttggttgatatgattaatctcttcaattcgatggacagagactgtattctacctaactgtcatatcttcaacatactgatttatgcatatgctaaatctgggaagcttgataaggctatgcttatatttagagatatgcagaaacaaggagtgagtccagatgcagtcacatattcaaccgtaatacatgcattttgcaaaaagggtaggttggatgatgctgtgataaagtttaatcagatgattgatacaggagtacgaccggaagcatctgcttatcgttccctaatccagggtttttgtacacatggcgatttggtgaaagcaaaggaatatgttactgaaatgatgaagaaaggtatgcttcctcctgatattatgttcttcagttcaatcatgcagaaactatgcacagaaggaagggtaatagaagcacgagatatccttgacttgatagtgcgcattggtatgaggcctaatgttttcatatttaatatactgatcggtgggtactgcctagtctgcaagatggaggatgcaacaaaaatgtttgaggatatggtgtcatttggtttagaaccttgtaatattacgtatggtatacttattaatggctattgcaaaaatagaaggattgatgatgggcttattctgttccaagagatgctgcacaagggacttaaacctacaacttttaattataatgtcatactggatgggttatttctggctggacgaactgttgctgcaaaggaaaagtttgatgagatggttgaatctggagtaagtgtgtgcagtgatacatattcgatagttcttgctggactttgcagaaataattgctctagcgaagtaatcatgctgttccagaaattaagggcaatgaacatgaaattcaatattagaattgtcactatcatgattgatgccttctacaaggttcggcgaaaccaagaagctaaggatttgtttgctgcaataccatccaatggcttggtagctaatgttgttacctacagcataatgatgaaaagtcttataaaagaaggttcagtggaagaagctgacactctttttatcgatggagaagagcggctgtactgcaaactcttggatgttaaatcatattatcagaaggttactggaaagaggagagatagtcaaggctggaaattatatgtcgaaagttga

SEQ ID NO: 3118 - DNA, 2379 bp, Triticum aestivum
atgcctcgcttctcctccagcacgccaatgtcgccaccacgcctccgcctcctcctcctcctccgacttggcgcccgccactcctcctccacctctcatccctcacgcatctgggatccccacgccgccttcgccgccgcgacgcagcgggctcgctctggcacgctcaccacggaggacgcacaccacctgttcgaagaattgctgcggcagggcaatcctgtccaggagcgtcccttgactaactttctggctgcccttgcccgcgcgcccgcgtccccattctgcagcgatggccccgccctggccgtcgccctcttcagccgtttgtcccgaggcgccggacgacgggtggcacagccaaatgttttcacctatggagtcctaatggactgctgctgccgtgcgcgccgcttggatctagcgatcgccttcttcgcccatctcctcaagacgggactggaggcaggccaagtcgttttcggcaccctcctcaagggactctgccacgcaaagcactcagatgaggctttggacgtggtgcttcacaggatgcctgagctaggctgcacccccgacgtggtggcctataccacggtcatccacggcttcttgaaggaaggccaagtaggcaaggcatgcaatctattccatggaatggcgcagcagggcgttgcgcctgatgtggtgacatatagctcagttattgatgcgctgtgcaaggccagagcaattgacaaggcagagtatttccttcgtgaaatggttgataatggtgtcgtacctaataatgtgacatataatagcctcatccatggatattcctctttgggccatcagaaggaggctgttagggtgctgaaagaaatgacaagacagggtatcatacctgatgtttttacttgcaactcggtcatggcctccctttgcaagaacggaaaaagcaaagaagctgcaaaaatgtttgattcaatgtccatgaagggcctgaaacctaacaccgtttcatatgttattctccttcatgggtatgccactgaaggatgcctagttgacatgatcaatctcttcaattccatggcaacagactgtattctacctaactgtcatatattcaacatactgatttatgcatatgctaaatctgggaagctcgacaaggctatgcttatatttaaagaaatgcagaaacaaggagtgagtccagatgcagtcacatattcaaccgtaatacatgcattttgcaaaaagggtaggttggatgatgctgtgataaagtttaatcagatgattgatacaggagtacgaccggacgcatctgtttatcgttccctaatccagggtttttgtacacatggcgatttggtgaaagcaaaggaatatgttactgaaatgatgaagaaaggtatgcttcctcctgatattatgttcttcagttcaatcatgcagaacctatgcacagaaggaagggtaatagaagcacgagatatccttgacttgatagtgtgcattggtatgaggcctgatgttttcatatttaatatactgatcggcggatactgcctagtccgcaagatggcagatgcatcaaaaatatttgatgatatggtgtcatatggtttagaaccttgtaatattacgtatggtatacttattaatggctattgcaaaaacggaaggattgatgacgggcttattctgttcaaggagatgctgcacaagggacttaaacctacaacttttaattataacgtcatactggatggattatttctggctagacaaactgttgctgcaaaggtgaagtttcatgagatggctgaatctggagtaagtgtgtgcattgatacatactctatagttcttggtggactttgtagaaataattgcatcggtgaagcaatcacgctatttcagaaattaagtacaatgaatgttaaattcaatattgcaattgtcaatatcatgattggtgcattcttcagggttcggcgaaaccaggaagctaaggatttgtttgctgcagtatcagccaatggtttggtagctaatgtctttacctacactgtaatgatgataaatcttatagaagaagggtcactggaagaagctgacactctctttttatcaatgaagaagtccggctgtactgccaactcttgtatgttaaatcatattatcagaaggttactggaaagaggagagatagtcaaggctggaaattatatgtcgaaagttgatgcaaagagctactcacttgaagctaaaactgttttgctgctgatctctctcttttcagggaatgggaaatatagagaacacataaaattgctccctatgaagtatcagtttctcgaagaagcagccacagttgaatag

SEQ ID NO: 3119 - DNA, 2379 bp, Triticum aestivum
atgcctcgcttctcctccaccacgccaatgtcgccaccccgcctcctcctccggctcggcgcccgccactcctcctccacctctcatccctcacgcatctgggatccccacgccgccttcgccgctgcgacgcagcgggcgcgctctggcacgctcaccacggaggacgcacaccacctgtttgatgaattgctgcggcagggcaatcctgtccaggagcgtcccttgactaactttctggctgccctcgcccgcgcgcccgcgtccgcattctgcagcgatggccctgccctggccgtcgccctcttcggccgtttgtcccgaggcgccggacgacgggtggcgcagccaaatgtcttcacctatggcgtcctcatggactgctgctgccgtgcgcgccgcctggatctagcgatcgccttcttcgcccgtctcctcaagacgggactggaggcaaaccaagtcatcttctgcaccctcctcaagggactctgccacgcaaagcgctcagatgaggctttggacgtggtgcttcacaggatgcctgagctaggctgcacccccaacgtggtggcctataccacggtcatccacggcttcttgaaggaaggccaagtaggcaaggcatgcaatctattccatggaatggcgcagcagggcgttgcgcctgatgtggtgacatataactcggttatcgatgcgttgtgcaaggccagagcaatggacaaggcagagtatttccttcgtgaaatggttgataatggtgtcgtacctaataatgtgacatataatagcctcatccatggatattcctctttgggccatcagaaggaggctgttagggtgctgaaagaaatgacaagacagggtatcataccagatgtcattacctgcacctcactcatgaccttcctttgcaagaatggaaaaagcaaggaagctgcagaaatttttgattcaatggccacgaagggcctgaaacatgacgccgtttcatatgctattctccttcatgggtatgccactgaaggatgcttggttgatatgattaatctcttcaattcgatggacagagactgtattctacctaactgtcatatcttcaacatactgatttatgcatatgctaaatctgggaagcttgataaggctatgcttatatttagagatatgcagaaacaaggagtgagcccagatgcattcacatattcaaccttaatacatgcattttgtaaaaagggtcggttggacgatgctatgataaagtttaatcagatggttgatacaggagtacgacagggcacagctgtttatggttctctaatccagggtttttgtacacacggcgatttggtgaaaggaaaggaattggttactgaaatgatgaacaaaggtatacctcctcctgacattatgttcttccattcaatcatgcagaacctatgcacagaaggaagggtagtagaagcacgggatatccttggcttgatagcacacataggtatgaggcctaatgtttgcacatttaatatactgattggtggatactgcctagtccgcaagatggaggatgcctcaaaaatatttcatgatatgatgtcatatggtttagaaccttctaatgttacgtatggtattcttattaatggctattgcaaaaacagaaggattgatgacgggctgattctgttcaaagaaatgttgcgcaagggacttaaacctacaacttttaattacaacatcatactggatggattatttctggctggacgaactgttgctgcaaaggaaaagtttgatgagatggttgaatctggagtaagtatgtgcatcagtacttactctatagttcttcgtggactttgtagaaataattgtagcggcgaagccatcacgctattccagacattaagcgcaatggatgtgaaattcaatattagaattgtcaatatcatgattgatgccttcttcagggttcagcgaaagcaagaagctaaggatttgtttgctgcaataacagccaatgggttggttgctaatgtttttacctacagcctaatgatgacaaatcttataaaagaagggtcagtggaagaggctgacacactctttttatcgatggagatgagcggctgtacttcgaactcgtggatgttaaatcttattatcagagggttgctggaaaaaggagagatagtcaaggctggatgttatatgtctaaagttgatgccaagagctactcacttgaagctaaaactgtttcgttgctgatctatctcttttcagggaaagggaaatacagagaacacataagattgctacctacaaagtatcagtttctcgaagaagcagccacagttgaatggtttgctatatag

SEQ ID NO: 3120 - DNA, 2358 bp, Triticum aestivum
atgtcgccactccgcctccgcctccgcctccggccccgcctccatgcccgccactcctactccacctcgcatcccccacgcggccagggctgggatccccacgcctccttcgcagctgccacggagcgcgcgcgatctggcaacctctcctcggaggacgcacaccacctgttcgaccaattgctcctgcaggctaatccggtcaacatgcgccttccgaacgaccttctcaccgccctggctcgcgcacctgcgtccgcatcctgcagcaacggccccgccctcgccgtcgccctcttcagccgtttgtcccaaggtgcccgccaacgggtggtgcagccaacggcctgcacctacggcatcctcatggactgctgctgccgcgcaaaccgccaggatctggcgctcgccttcttcgcccgtctcctcaggacgggactcaaggcaggcgtcatagaagtcaacactcttctcaagggactctgccgtgcaaagcgggctgatgaggctctggacattctgcttcacaggatgcctgagctaggctgcacccccaacgtggtggcatataacacggtcatccatggcttcttccaagaaggccaagcaggcaaggcgtgcagcttgttccatgaaatggcgcagcagggcgttgcgcctagtttggtgacatataactcggttattgatgcgctgtgcaaggccagagccatggacaaggcagagtatttccttggtcagatggttgatgatggtgtcatacctgataatgtgacatataatagcctcatccatggatattcctcttcaggccactggaaggaggcagttagggtattcaaagagatgacaagtcggagggttaaaccaaatgtgcatactcacaacatgtttatgacctttctttgcaaacatggaagaagcaaagaagctgcaggaatttttgataccatggctatgaagggcctgaaacataacaacgtttcatatgctattctccttcacgggtatgccaccgaaggatgcttagttgatatgattaatctcttcaattcaatggaaagatactgcattctacctgactgtcgtatcttcaacatactgattcatgcacatgctaaatctgggaagcttgataaggccatgcttatcttcaatgaaatgcagaaacaaggagtgagtccaaatgcagtcacatattcaaccataatacatgcattttgcaaaaagggtaggttggacgatgctgtgataaagtttaatcagatgattgatacaggagtacgacagggcacagctgtttatcgttccctaatccagggtttttgtacacacggcgattcggtgaaagcaaaggaattgctcactgaaatgatgaacaaaggtatgcttcctcctgatattgcattcttcaattcaatcatgcagaacctttgcacagaaggaagggtaatagaagcacgggatgtccttggcttgatagcgcacataggtatgaggcctgatgtttgcacatttaatatactgatcggtggatactgcctagtcggcaagatggaacatgcctcaaaaatatttgatgatatgatgtcatatggcttagaaccttctaatattacgtatggtatacttattaatggctattgcaaaaatagaaggattgatgacgggcttattctgttcaaagagatgctgcacaagggacttaaacctacaacttttaattataacgtcatactggatggattatttctggctggacgaactgttgctgcaaaggaaaagtttgatgagatggttgaatctggagtaagtgtgtgcattggtacatattcgatagttcttggtggactttgtagaaataattgtagcggcgaagcaatcacgctattccagaaattaagcacaatggatgtgaaattcaatattataattgtcaatataatgattgatgctttctacaaggttcagcgaaaccaagaagccaaggatttgtttgctgcagtatcagccaatggtttggtagctaatgtctttacctacaccataatgatgaaaaatcttataaaagaagggtcagtggaagaagctgacgatctctttttatcaatggagaagtccggctgtactgctgactcttatatgttaaatcttatcgtcagaatgttactgggaaaaggagagatagtcaaggctgggaattatatatctaaaattgatgcaaagagctactcacttgaagctaaaactgtttcgctgcttatctctctcttttcagggaaagggaaatatagagaacacataggattgctccctgcaaagtatcggtttcgtgaagaagcagctacagttgtgtag

SEQ ID NO: 3121 - DNA, 2001 bp, Triticum aestivum
atggtccgtcctgtagaaaccccaacccgtgaaatcaaaaaactcgacggcctgtgggcattcagtctggatcgcgaaaactgtggaattggtcagcgttggtgggaaagcgcgttacaagaaagccgggcaattgctgtgccaggcagttttaacgatcagttcgccgatgcagatattcgtaattatgcgggcaacgtctggtatcagcgcgaagtctttataccgaaaggttgggcaggccagcgtatcgtgctgcgtttcgatgcggtcactcattacggcaaagtgtgggtcaataatcaggaagtgatggagcatcagggcggctatacgccatttgaagccgatgtcacgccgtatgttattgccgggaaaagtgtacgtaagtttctgcttctacctttgatatatatataataattatcattaattagtagtaatataatatttcaaatatttttttcaaaataaaagaatgtagtatatagcaattgcttttctgtagtttataagtgtgtatattttaatttataacttttctaatatatgaccaaaatttgttgatgtgcaggtatcaccgtttgtgtgaacaacgaactgaactggcagactatcccgccgggaatggtgattaccgaggaaaacggcaagaaaaagcagtcttacttccatgatttctttaactatgccggaatccatcgcagcgtaatgctctacaccacgccgaacacctgggtggacgatatcaccgtggtgacgcatgtcgcgcaagactgtaaccacgcgtctgttgactggcaggtggtggccaatggtgatgtcagcgttgaactgcgtgatgcggatcaacaggtggttgcaactggacaaggcactagcgggactttgcaagtggtgaatccgcacctctggcaaccgggtgaaggttatctctatgaactgtgcgtcacagccaaaagccagacagagtgtgatatctacccgcttcgcgtcggcatccggtcagtggcagtgaagggcgaacagttcctgattaaccacaaaccgttctactttactggctttggtcgtcatgaagatgcggacttgcgtggcaaaggattcgataacgtgctgatggtgcacgaccacgcattaatggactggattggggccaactcctaccgtacctcgcattacccttacgctgaagagatgctcgactgggcagatgaacatggcatcgtggtgattgatgaaactgctgctgtcggctttaacctctctttaggcattggtttcgaagcgggcaacaagccgaaagaactgtacagcgaagaggcagtcaacggggaaactcagcaagcgcacttacaggcgattaaagagctgatagcgcgtgacaaaaaccacccaagcgtggtgatgtggagtattgccaacgaaccggatacccgtccgcaaggtgcacgggaatatttcgcgccactggcggaagcaacgcgtaaactcgacccgacgcgtccgatcacctgcgtcaatgtaatgttctgcgacgctcacaccgataccatcagcgatctctttgatgtgctgtgcctgaaccgttattacggatggtatgtccaaagcggcgatttggaaacggcagagaaggtactggaaaaagaacttctggcctggcaggagaaactgcatcagccgattatcatcaccgaatacggcgtggatacgttagccgggctgcactcaatgtacaccgacatgtggagtgaagagtatcagtgtgcatggctggatatgtatcaccgcgtctttgatcgcgtcagcgccgtcgtcggtgaacaggtatggaatttcgccgattttgcgacctcgcaaggcatattgcgcgttggcggtaacaagaaagggatcttcactcgcgaccgcaaaccgaagtcggcggcttttctgctgcaaaaacgctggactggcatgaacttcggtgaaaaaccgcagcagggaggcaaacaatga

SEQ ID NO: 3122 - DNA, 6069 bp, Triticum aestivum
catatttccttcactagcttggtgcgaggcttgcaactttctcctgtgatgctcatcaacaaaatcggagctgtcggtcctcgacgcctgcggccgatcgtttggcttggctgtcgaggtcatcgggtgtcgtttgttcagaggggtcttgatgggtcgtcagcgaggaaaccagagttgcctgctcgcagagaggcgatgacgatgacattgcttgcagcctcgacggtgtcctctcctcagcggtatgtgtgtggtcttgtcagtgccaggtcggccggagcgccctattcgatgggcgtgttttaattaaccgagcaactctcttcttcttaatcaatgaaaatggcaagtcttttaccttgtttcaaaaagagttagatgcactggaggtcctaaaggtttcgtcgaggtgtcagtttagtcctatgtcttccaaaatgcgcctttaggtcctaattctttcttaagtggttcacccgaggtccttttccacgaccactcgctgaccagcccacgtgccgcattgacccacgccacgtcgacagagggtccaaccgccaggcgagaagcttcgcaaagagacaccccccctcttagtggcacccctctcctctttcacggtactttggcgacattggaggcgagtggcagaggcaaccggaggtgatctggaggcaatctgagtgggtgcccgtgaagatgccccttctacgacggccagtgagcgatcctcctccatgttaccgtgagaaccctaatcttgtcgatgctcttctcctgtagctcttctaatatgccataactctgccataatcaatagttgtagtccttgatttactttgatttgcataacggtgctacggacacggcaaaaaggacacaccaccggcgacaacatacccgccgaagttggagcttgcttcgccgcgccggtggcggtgctgacgatgctgccatgctcctcatcttcagttgtttccttgccgaggagcttgaagttccggccatggataggtttagggcacacgagagagcagatttggggaagaaataaagtcagggactggggaatgagaaggtaatgttcataaggggttttctgtaaaaagaaagagcaacctaagcgacccctttgtcgacttggcgtgggtcaatgcgccacacaggcaggtcaatgagcgcttgtgagaaaaaggtcctcgggtaaaccacttgcttaaagaattactccctccgtcccatattataagaacgtttttgacactagtgtagtgtcaaaaacgttcttatattatgggacggagggagtagtacctaaaggtgcattttggactaaataagactaaagtgacacccagacgaaacttttaggacctcgagtgcatctaactcttaaaaaaacaaagatgctaaaaaaactaaatgcttaaaaatatatttttctatgggaatacttaaaaatactattataattttatggcttcctagtatatttctagggcttacaactaaatttatattcttggtctaaataaaattataatctgataaattatgtgatatgaatatgtcatataggcatatgagaccataatttaattttacctgcaaaaaataagtaatagtagtagtactactagataagataacttggtaaagcactagccccgtcgtctcccagttcaggatctacctacactgcacaccaaggccatgcctcgcttctcctccaccacgccaatgtcgccaccccgcctcctcctccggctcggcgcccgccactcctcctccacctctcatccctcacgcatctgggatccccacgccgccttcgccgctgcgacgcagcgggcgcgctctggcacgctcaccacggaggacgcacaccacctgtttgatgaattgctgcggcagggcaatcctgtccaggagcgtcccttgactaactttctggctgccctcgcccgcgcgcccgcgtccgcattctgcagcgatggccctgccctggccgtcgccctcttcggccgtttgtcccgaggcgccggacgacgggtggcgcagccaaatgtcttcacctatggcgtcctcatggactgctgctgccgtgcgcgccgcctggatctagcgatcgccttcttcgcccgtctcctcaagacgggactggaggcaaaccaagtcatcttctgcaccctcctcaagggactctgccacgcaaagcgctcagatgaggctttggacgtggtgcttcacaggatgcctgagctaggctgcacccccaacgtggtggcctataccacggtcatccacggcttcttgaaggaaggccaagtaggcaaggcatgcaatctattccatggaatggcgcagcagggcgttgcgcctgatgtggtgacatataactcggttatcgatgcgttgtgcaaggccagagcaatggacaaggcagagtatttccttcgtgaaatggttgataatggtgtcgtacctaataatgtgacatataatagcctcatccatggatattcctctttgggccatcagaaggaggctgttagggtgctgaaagaaatgacaagacagggtatcataccagatgtcattacctgcacctcactcatgaccttcctttgcaagaatggaaaaagcaaggaagctgcagaaatttttgattcaatggccacgaagggcctgaaacatgacgccgtttcatatgctattctccttcatgggtatgccactgaaggatgcttggttgatatgattaatctcttcaattcgatggacagagactgtattctacctaactgtcatatcttcaacatactgatttatgcatatgctaaatctgggaagcttgataaggctatgcttatatttagagatatgcagaaacaaggagtgagcccagatgcattcacatattcaaccttaatacatgcattttgtaaaaagggtcggttggacgatgctatgataaagtttaatcagatggttgatacaggagtacgacagggcacagctgtttatggttctctaatccagggtttttgtacacacggcgatttggtgaaaggaaaggaattggttactgaaatgatgaacaaaggtatacctcctcctgacattatgttcttccattcaatcatgcagaacctatgcacagaaggaagggtagtagaagcacgggatatccttggcttgatagcacacataggtatgaggcctaatgtttgcacatttaatatactgattggtggatactgcctagtccgcaagatggaggatgcctcaaaaatatttcatgatatgatgtcatatggtttagaaccttctaatgttacgtatggtattcttattaatggctattgcaaaaacagaaggattgatgacgggctgattctgttcaaagaaatgttgcgcaagggacttaaacctacaacttttaattacaacatcatactggatggattatttctggctggacgaactgttgctgcaaaggaaaagtttgatgagatggttgaatctggagtaagtatgtgcatcagtacttactctatagttcttcgtggactttgtagaaataattgtagcggcgaagccatcacgctattccagacattaagcgcaatggatgtgaaattcaatattagaattgtcaatatcatgattgatgccttcttcagggttcagcgaaagcaagaagctaaggatttgtttgctgcaataacagccaatgggttggttgctaatgtttttacctacagcctaatgatgacaaatcttataaaagaagggtcagtggaagaggctgacacactctttttatcgatggagatgagcggctgtacttcgaactcgtggatgttaaatcttattatcagagggttgctggaaaaaggagagatagtcaaggctggatgttatatgtctaaagttgatgcgaagagctactcacttgaagctaaaactgtttcgttgctgatctatctcttttcagggaaagggaaatacagagaacacataagattgctacctacaaagtatcagtttctcgaagaagcagccacagttgaatggtttgctatatgatatctggacgtaactcctagaagctaaacttgagttgttacttgccataggttctcctgcttttgcaacaaatgcctttcatatgtgtaaatagaaagtcagcttataagaagccgtcaggatggcagagagagaacaaatcaaacgcactccaaaacaaaagagaaacctcgccaaactgaatccaaactcaaacaggtgcatcatcaaaagtctgaagctgtactgtttgctagccaaactcctacgggagattgtcaggcggccgggcatgaagtggcaggcgtctatgcgccttcgctgctgccagcatccatggcttagcatcacacggaatcgagtcaaccaattcccagcgagtttgggcgcctccattgaagatgcaaccgtttctagccgccaaatacgcctaagggtcagagtaatcagcgagcatgccccttttgtctggttcgagaagaatttgaagaagctagcagcaacaggagcttgaccggtttgttctcatcaaagccagtttaaggttagttaattataacatggtaataaagaggtgttttgttgactgttgaggtgtaatatgttatatgccaagctcttgatgattagggtgacctgtgaagcatgcaaaagtctgaatcatatgtgcttgttagttattttggcaactttttagtcttttttccatgtacagattttatggatccatttgaagtagtatgtacattctggcattaaatatgaggtgtagaggtttacttaaggaccggtctgcaaatttttttttgatcgaggcagcaccacgttgagtttaaccctgtaacttggctcacctcgatcatgctagtgttatcgccggaaattgtattatcactgggctcagcgtttttttacattgaattaaacatactctgtggttgcagaaactgactccaaacagtgttcacagttaatatggctctgtcggtaattttcattgactgtcaacatgttccttttttgaaaagtaggctggccagttgtcgttcagtactctgtatataatgatggtaagactgacaaggatatgacggatggatttgagcttctttgccatagttcaaagtgtgcagtctgggttatgctttatattattttctttttggctttggtagtatgaacaggaagcaggcaggaacgaactgatatgtggtactatattttgttatggaatctagttgttgttgttgttatcattattattattgtcatcataatcattatcccttttctccaagaaaaagtgtgccctaaattatagatcagttcattcatctcgcctctttttttaggggccatagtctgatggattttgaagagcttctccatggttttctcttctgttccttggtgcagggcctggtggaattatgctgaactgtaacattttggtactacagaaaagttcttcttaagttggtcgctttgggggcacattacatgtttgaggtactctaatttttccttggcatgtctagaccttgaatatggtttgtattaatgcactgttattattcaaattacagatatctaattttgtggaagtttattttctgactccctagatatcctgttttagttgtactattaaaggaaaaggactaccttatatttcacccatgactttcttttaggaatcagctgtaccattttataataaattatgtacgatgaaaaatgttaacaataaaccacaccagctcaaattgtttgcgaagctgaatcttaactgatgtgaggtcatattgttcttgatcttttaaaactgtaccttgtgaataatttggcatgtctaccacattacctggttaatgccctgctgagtttagtttcataatgcatggactgtgttttatcatgttaattaaacctgtgcatttcctcaacttttatttggtatcttcagctaatgccatatgaccatccagatgaact

SEQ ID NO: 3123 - DNA, 1716 bp, Triticum aestivum
catatttccttcactagcttggtgcgaggcttgcaactttctcctgtgatgctcatcaacaaaatcggagctgtcggtcctcgacgcctgcggccgatcgtttggcttggctgtcgaggtcatcgggtgtcgtttgttcagaggggtcttgatgggtcgtcagcgaggaaaccagagttgcctgctcgcagagaggcgatgacgatgacattgcttgcagcctcgacggtgtcctctcctcagcggtatgtgtgtggtcttgtcagtgccaggtcggccggagcgccctattcgatgggcgtgttttaattaaccgagcaactctcttcttcttaatcaatgaaaatggcaagtcttttaccttgtttcaaaaagagttagatgcactggaggtcctaaaggtttcgtcgaggtgtcagtttagtcctatgtcttccaaaatgcgcctttaggtcctaattctttcttaagtggttcacccgaggtccttttccacgaccactcgctgaccagcccacgtgccgcattgacccacgccacgtcgacagagggtccaaccgccaggcgagaagcttcgcaaagagacaccccccctcttagtggcacccctctcctctttcacggtactttggcgacattggaggcgagtggcagaggcaaccggaggtgatctggaggcaatctgagtgggtgcccgtgaagatgccccttctacgacggccagtgagcgatcctcctccatgttaccgtgagaaccctaatcttgtcgatgctcttctcctgtagctcttctaatatgccataactctgccataatcaatagttgtagtccttgatttactttgatttgcataacggtgctacggacacggcaaaaaggacacaccaccggcgacaacatacccgccgaagttggagcttgcttcgccgcgccggtggcggtgctgacgatgctgccatgctcctcatcttcagttgtttccttgccgaggagcttgaagttccggccatggataggtttagggcacacgagagagcagatttggggaagaaataaagtcagggactggggaatgagaaggtaatgttcataaggggttttctgtaaaaagaaagagcaacctaagcgacccctttgtcgacttggcgtgggtcaatgcgccacacaggcaggtcaatgagcgcttgtgagaaaaaggtcctcgggtaaaccacttgcttaaagaattactccctccgtcccatattataagaacgtttttgacactagtgtagtgtcaaaaacgttcttatattatgggacggagggagtagtacctaaaggtgcattttggactaaataagactaaagtgacacccagacgaaacttttaggacctcgagtgcatctaactcttaaaaaaacaaagatgctaaaaaaactaaatgcttaaaaatatatttttctatgggaatacttaaaaatactattataattttatggcttcctagtatatttctagggcttacaactaaatttatattcttggtctaaataaaattataatctgataaattatgtgatatgaatatgtcatataggcatatgagaccataatttaattttacctgcaaaaaataagtaatagtagtagtactactagataagataacttggtaaagcactagccccgtcgtctcccagttcaggatctacctacactgcacaccaaggcc

SEQ ID NO: 3124 - DNA, 1974 bp, Triticum aestivum
tatctggacgtaactcctagaagctaaacttgagttgttacttgccataggttctcctgcttttgcaacaaatgcctttcatatgtgtaaatagaaagtcagcttataagaagccgtcaggatggcagagagagaacaaatcaaacgcactccaaaacaaaagagaaacctcgccaaactgaatccaaactcaaacaggtgcatcatcaaaagtctgaagctgtactgtttgctagccaaactcctacgggagattgtcaggcggccgggcatgaagtggcaggcgtctatgcgccttcgctgctgccagcatccatggcttagcatcacacggaatcgagtcaaccaattcccagcgagtttgggcgcctccattgaagatgcaaccgtttctagccgccaaatacgcctaagggtcagagtaatcagcgagcatgccccttttgtctggttcgagaagaatttgaagaagctagcagcaacaggagcttgaccggtttgttctcatcaaagccagtttaaggttagttaattataacatggtaataaagaggtgttttgttgactgttgaggtgtaatatgttatatgccaagctcttgatgattagggtgacctgtgaagcatgcaaaagtctgaatcatatgtgcttgttagttattttggcaactttttagtcttttttccatgtacagattttatggatccatttgaagtagtatgtacattctggcattaaatatgaggtgtagaggtttacttaaggaccggtctgcaaatttttttttgatcgaggcagcaccacgttgagtttaaccctgtaacttggctcacctcgatcatgctagtgttatcgccggaaattgtattatcactgggctcagcgtttttttacattgaattaaacatactctgtggttgcagaaactgactccaaacagtgttcacagttaatatggctctgtcggtaattttcattgactgtcaacatgttccttttttgaaaagtaggctggccagttgtcgttcagtactctgtatataatgatggtaagactgacaaggatatgacggatggatttgagcttctttgccatagttcaaagtgtgcagtctgggttatgctttatattattttctttttggctttggtagtatgaacaggaagcaggcaggaacgaactgatatgtggtactatattttgttatggaatctagttgttgttgttgttatcattattattattgtcatcataatcattatcccttttctccaagaaaaagtgtgccctaaattatagatcagttcattcatctcgcctctttttttaggggccatagtctgatggattttgaagagcttctccatggttttctcttctgttccttggtgcagggcctggtggaattatgctgaactgtaacattttggtactacagaaaagttcttcttaagttggtcgctttgggggcacattacatgtttgaggtactctaatttttccttggcatgtctagaccttgaatatggtttgtattaatgcactgttattattcaaattacagatatctaattttgtggaagtttattttctgactccctagatatcctgttttagttgtactattaaaggaaaaggactaccttatatttcacccatgactttcttttaggaatcagctgtaccattttataataaattatgtacgatgaaaaatgttaacaataaaccacaccagctcaaattgtttgcgaagctgaatcttaactgatgtgaggtcatattgttcttgatcttttaaaactgtaccttgtgaataatttggcatgtctaccacattacctggttaatgccctgctgagtttagtttcataatgcatggactgtgttttatcatgttaattaaacctgtgcatttcctcaacttttatttggtatcttcagctaatgccatatgaccatccagatgaact

SEQ ID NO: 3125 - DNA, 4926 bp, Triticum aestivum
gtgcagcgtgacccggtcgtgcccctctctagagataatgagcattgcatgtctaagttataaaaaattaccacatattttttttgtcacacttgtttgaagtgcagtttatctatctttatacatatatttaaactttactctacgaataatataatctatagtactacaataatatcagtgttttagagaatcatataaatgaacagttagacatggtctaaaggacaattgagtattttgacaacaggactctacagttttatctttttagtgtgcatgtgttctcctttttttttgcaaatagcttcacctatataatacttcatccattttattagtacatccatttagggtttagggttaatggtttttatagactaatttttttagtacatctattttattctattttagcctctaaattaagaaaactaaaactctattttagtttttttatttaataatttagatataaaatagaataaaataaagtgactaaaaattaaacaaataccctttaagaaattaaaaaaactaaggaaacatttttcttgtttcgagtagataatgccagcctgttaaacgccgtcgacgagtctaacggacaccaaccagcgaaccagcagcgtcgcgtcgggccaagcgaagcagacggcacggcatctctgtcgctgcctctggacccctctcgagagttccgctccaccgttggacttgctccgctgtcggcatccagaaattgcgtggcggagcggcagacgtgagccggcacggcaggcggcctcctcctcctctcacggcaccggcagctacgggggattcctttcccaccgctccttcgctttcccttcctcgcccgccgtaataaatagacaccccctccacaccctctttccccaacctcgtgttgttcggagcgcacacacacacaaccagatctcccccaaatccacccgtcggcacctccgcttcaaggtacgccgctcgtcctccccccccccccctctctaccttctctagatcggcgttccggtccatggttagggcccggtagttctacttctgttcatgtttgtgttagatccgtgtttgtgttagatccgtgctgctagcgttcgtacacggatgcgacctgtacgtcagacacgttctgattgctaacttgccagtgtttctctttggggaatcctgggatggctctagccgttccgcagacgggatcgatttcatgattttttttgtttcgttgcatagggtttggtttgcccttttcctttatttcaatatatgccgtgcacttgtttgtcgggtcatcttttcatgcttttttttgtcttggttgtgatgatgtggtctggttgggcggtcgttctagatcggagtagaattaattctgtttcaaactacctggtggatttattaattttggatctgtatgtgtgtgccatacatattcatagttacgaattgaagatgatggatggaaatatcgatctaggataggtatacatgttgatgcgggttttactgatgcatatacagagatgctttttgttcgcttggttgtgatgatgtggtgtggttgggcggtcgttcattcgttctagatcggagtagaatactgtttcaaactacctggtgtatttattaattttggaactgtatgtgtgtgtcatacatcttcatagttacgagtttaagatggatggaaatatcgatctaggataggtatacatgttgatgtgggttttactgatgcatatacatgatggcatatgcagcatctattcatatgctctaaccttgagtacctatctattataataaacaagtatgttttataattattttgatcttgatatacttggatgatggcatatgcagcagctatatgtggatttttttagccctgccttcatacgctatttatttgcttggtactgtttcttttgtcgatgctcaccctgttgtttggtgttacttctgcaggtctccaccatgtccaggctccgctccgccagcaccgccccaatgccacgcctgaggctcctgagctgcaggagctactccatcagcaccctgccaccaagcaggtcctggagcccacacgccgccttcgccgccgccaccgagagggtgagcgccggcaccctcaccccagaggacgcccaccacctcttcgacgagctcctgcgccaaagcaccccagtgccagccaggagcctaaacggcttcctcaccgccctggccagggccagggacaccgacgcctgcagggacggcccagccctggccctcgccctgtttaacaggaccaggcgcgaggaagccggctcaagggtcgtgagcccaaccatctttacctacggcatccttatgaactgctgctgccacaccctccgcccagacctgggcctcgccttcttcggcagggtcctcaggatgggcctcaagaccaacgtcgtggtcgccaccaccgtgctgaagtgcctatgcggcgccaagaggaccgacgaggccgtcaacatcctcctgcataggatgtccgagctgggctgcgtcccagacgacttcagctactcaatcgtgctcaagtccctgtgcgacgacggccgctcccaaagggccctggacctcctccaaatgtgggagaaggagaggggcgtctgctccccaaacgtcgtggcctacaacatcgtgatccacggcttcttcaaggaaggcgaggtctccaaggcctgcgacctgttccacgccatggtgcaaaggggcgtcgtgcctaacgtcatgacctacaccctcaccatcgacgccctctgcaaggccagggccatggacaaggccaagctgttcctcaggcagatgatcgacaagggcgtgaggccaaacaacgtgacctacaacgtgatgatccacggctactccaccctgggccagtggaaggaagccggcaaggtgttccgcgagatgagccgccagggcctgatccctgacatcgtgacctggacctccttcatggccagcctctgcaagcacggcaggaccaaggaagccgccaacttcttcgacagcatgaccgccaagggccacaagccagacctggtcacctaccacgtgctcctgcacggctacggcaccgagggctgcttcgccgacatgatcaacctcgtgaacagcatggccaccaagggcatcgtgccagataggcaggtcttcaacatcctgatcgacgcccacgccaagcacggcatgatggacgaggccatgcacatcttcaccggcatgcaaggccagggcgtctgcccagacgtgtggacctactccaccatcatcagcgccctctgccgcatgggcaggctggccgacggcatggacaacttctcccaaatgatcggcaagggcgtggagcctaacaccgtcgtgtaccactccctcatccaaggcttcagcacccacggcgacctccgcaaggccaaggagctggtgtacgagatgaggaacaagggcatcccatgcccaaacatcgccttcttcacctccatcatggacagcctgtgcaaggaaggccgcgtcatggacgcccacgacatcttcaacctcgtgaccgacatcggcgagaagccaaacgtcatcacctttaacaccctcatcgacggccactgcctggtgggcgagatggagaaagccttcggcgtgctcgacagcatggtctccgccggcatcgaggccgacgtcttcacctacaacaccctggcctacggctactgccgctgcggcaggatcgacgacggcctaatcctgttcagggagatgctccgcaagaagccaaagccaaccaccatcacctacaacatcatcctggacggcctcttcagggccggcaggaccgtggccgccaagaaaatgttccacgagatgatcgagggcggcatcaccgtgtccatgagcacctactccatcatcctcggcggcctgtgcaggaacaactgcgccgaggaagccatcaccctgttccaaaagctgggcgccatgaacgtgaagctggacatcaggatcctcaacaccatgatcaacgccatgttcaaggtccgcaggcgcgaggaagccaacagcctgttcgccgccatcagcgcctccggcatggccccaaacgcctccacctacggcctcatgatcggcaacctgctcaaggaaggctccgtccaagaggccgagaatatgttctccctcatggagaagtccggctgcgccccaggcagcaggctcatcaacaacatcatccgcatcctcctggagaagggcgacatcgtgaaggccggcaactacatgtccaaggtggacggcaagaccatctccctggaggcctccaccaccagcctgctgatgtgcctcttctccagcaagggccgctacagggagcagatcaacctgctcccaggcaactaccaattcttcaacggcgtctcctgaaacgcatccatggacgtggattgaattgaaggtgtactactgctgtgctggtccgtggatcgtggctgtcatgcatggtttgctgtgtcttctacgatatgtacttccctttgttccgtatatgtacatcttcctcgtttggttcatgtattttcctttgaataataataaataaatcgggctttccatatcggatgcttttatatctgtgtgtatggagattgtggtatatggtttcatctcaagttgtttacgtcaagaactaaagatatttcctcaaaaaaaaagaactaaagatataatcaatgtcattaacataactcatttccatgaggagaggacgaaggacgaagtcataataagtagattggttgatattttataatcattcaaaactgcaggggttataagatcttcattttgtagaagttttagatcttccgaggggttctc

SEQ ID NO: 3126 - DNA, 5726 bp, Triticum aestivum
ggtggcggcccccctttcctgcctttggtcattcgtctccgcgcaggtcggctgctctggccggcccttggtggttgctgtagtgctgcggcaagggggtgccagatccatcggttcttcattcggatccagctcgtctcttgccttactcagggtcggtcaccccgtgaccttgcctgcggcagtgagggggtgtgcgtgctctgtgatgggccttgtgaggcgatggcgcgcttgctgcgcaggggtgtgcgggccaacttgtgtcggctgcgtgagggtgttggttgagtctgctccaagcgcaagcttgcccggctatggccggccggtggtggcggcgcctacgggtgtcgtttcccttgttgaaggcgttgttgtggagttcttcgacctactacaatctcgaatctggttcttcgggcgaaagccttgccccatctgggtcgggcaacgacgtcgtccgtacgatgttttccccctttggggcgttgctttgaaggccggttaacctttcccgtgctacctttgggttggtcgtgcatggtgtcatggttggctggtgctcaaccggtgatgcgagtggttggcgttgcgactcgtgcggcgacgaagatggtgatgtgcagagctgggtcgcggcttgtccttctgatgtcggcggttcgattcccctttgggtgcatctgtgcttgtttctcactatgacagagaagttgaagctgcatgcagcggggcccttgcagcaatgatgactccatgagggtggtttcggcagacggtgctctccgtaggttgcactggactagcttggtgcgaggcttgcaactttctcctgtgatgctcatcaacaaaatcggagctgtcggtcctcgacgcctgcggccgatcatttggcttggctgtcgaggtcatcgggtgtcgtttgttcagaggggtcttgatgggtcgtcagcgaggaaaccagagttgcctgctcgcggagaggcgatgacgatgacattgcttgcagcctcgacggtgtcctctcctcagcggtatgtgtgtggtcttgtcagtgccaggtcggccggagcgtcctattcgatgggcgtgttttaattaaccgagcaactctcttcttcttaatcaatgaaaatggcaagtcttttacctcgtttcaaaaagagttagatgcactggaggtatcgagatgtcagtttagtcctatgtcttccaaaatgcgcctttaggtcctaattctttcttaattggttcacccgaggtccttttccacgaccactcgctgaccagcccacgtgccgcattgacccacgccacgtcgacagagggtccaaccgccaggcgagaagcttcgcaaagagacaccccccctcttagtggcacccctctcctctttcacggtactttggcgacattggaggcgagtggcagaggcaaccggaggtgatctggaggcaatctgagtgggtgcccgtgaagatgccccttctatgacggccagtgagcggtcctcctccatgttaccgtgagaaccctaatcttgtcgatgctcttctcctgtagctcttctattatgccataactctgccataatcaatagttgtagtccttgatttacttcgatttgcataacggtgctacggacacggcaaaaaagacacaccaccagcggcaacatactcgccgaagttggagcttgcttcgccgcgccggtggcggtgctgacgatgctgccatgctcctcatcttcagttgtttccttgccgaggagcttgaagttccggccatggataggtttagggcacacgagagagcagatttggggaagaaataaagccagggactggggaatgagaaggtaatgttcataaggggttttctgtaaaaagaaagagcaacctaagcggcccctttgtcgacttggcgtgggtcaatgcgccacataggcaggtcaatgagcgcttgtgagaaaaaggtcctcgggtaaaccacttgcttaaagaattactccctccgtcctataatataagaacgtttttgacactcactagtgtagtgtcaaaaacgtttttatattatgggacggagggagtagtacctaaaggtgcattttggactaaataagactaaagtgacaccccgacgaaacttttaggacctcgagtgcatttaactcttaaaaaaacaaagatgctaaaaaaactaaatgcttaaaaatatatttttctatgggaatacttaaaaatactattataattttatggcttcctagtatatttctagggcttacaactaaatttatattcttggtctaaataaaattataatctgataaattatgtgatatgaatatgtcatatagccatatgagaccataatttaattttacctgcaaaaaataagtaatagtagtagtactactagataagataacttggtaaagcactagccccgtcgtctcccagttcaggatctacctacactgcacaccaaggccatgcctcgcttctccaccaccacgccaatgtcgccaccccgcctcctcctccgactcggcgcccgccactcctcctccacctctcatccctcacgcatctgggatccccacgccgccttcgccgctgcgacgcagcgggcgcgctctggcacgctcaccacggaggacgcacaccacctgtttgatgaattgctgcggcagggcaatcctgtccaggagcgtcccttgactaactttctggctgccctcgcccgcgcgcccgcgtccgcattctgcagcgatggccctgccctggccgtcgccctcttcggccgtttgtcccgaggcgccggacgacgggtggcgcagccaaatgtcttcacctatggcgtcctcatggactgctgctgccgtgcgcgccgcctggatctagcgatcgccttcttcgcccgtctcctcaagacgggactggaggcaaaccaagtcatcttctgcaccctcctcaagggactctgccacgcaaagcgctcagatgaggctttggacgtggtgcttcacaggatgcctgagctaggctgcacccccaacgtggtggcctataccacggtcatccacggcttcttgaaggaaggccaagtaggcaaggcatgcaatctattccatggaatggcgcagcagggcgttgcgcctgatgtggtgacatataactcggttatcgatgcgttgtgcaaggccagagcaatggacaaggcagagtatttcctttgtgaaatggttgataatggtgtcgtacctaataatgtgacatataatagcctcatccatggatattcctctttgggccatcagaaggaggctgttagggtgctgaaagaaatgacaagacagggtatcataccagatgtcattacctgcacctcactcatgaccttcctttgcaagaatggaaaaagcaaggaagctgcagaaatttttgattcaatgcccacgaagggcctgaaacatgacgccgtttcatatgctattctccttcatgggtatgccactgaaggatgcttggttgatatgattaatctcttcaattcgatggacagagactgtattctacctaactgtcatatcttcaacatactgatttatgcatatgctaaatctgggaagcttgataaggctatgcttatatttagagatatgcagaaacaaggagtgagtccagatgcagtcacatattcaaccgtaatacatgcattttgcaaaaagggtaggttggatgatgctgtgataaagtttaatcagatgattgatacaggagtacgaccggaagcatctgcttatcgttccctaatccagggtttttgtacacatggcgatttggtgaaagcaaaggaatatgttactgaaatgatgaagaaaggtatgcttcctcctgatattatgttcttcagttcaatcatgcagaaactatgcacagaaggaagggtaatagaagcacgagatatccttgacttgatagtgcgcattggtatgaggcctaatgttttcatatttaatatactgatcggtgggtactgcctagtctgcaagatggaggatgcaacaaaaatgtttgaggatatggtgtcatttggtttagaaccttgtaatattacgtatggtatacttattaatggctattgcaaaaatagaaggattgatgatgggcttattctgttccaagagatgctgcacaagggacttaaacctacaacttttaattataatgtcatactggatgggttatttctggctggacgaactgttgctgcaaaggaaaagtttgatgagatggttgaatctggagtaagtgtgtgcagtgatacatattcgatagttcttgctggactttgcagaaataattgctctagcgaagtaatcatgctgttccagaaattaagggcaatgaacatgaaattcaatattagaattgtcactatcatgattgatgccttctacaaggttcggcgaaaccaagaagctaaggatttgtttgctgcaataccatccaatggcttggtagctaatgttgttacctacagcataatgatgaaaagtcttataaaagaaggttcagtggaagaagctgacactctttttatcgatggagaagagcggctgtactgcaaactcttggatgttaaatcatattatcagaaggttactggaaagaggagagatagtcaaggctggaaattatatgtcgaaagttgatgcaaagagctactcacttgaagctaaaactgtttcgctgctgatctccctcttttcagggaaagggaagtatagagaacacataaaattgctccctatgaagtatcagtttctcgaagaagcagccacagttgaatagtttgatacatgatctctgaactcaactcctagaagttaacttggattgttgcttgccatgggtccttatgcttgtacaacaaatgcattttctgtttggtaaatagaaagccagtcctaaattctgtcactttttgttaagttcgtgatgcgctgaaataactatttttttccgttagttattgtgagtagtatctgaaatttcctatatttttgtttctcaggcttatcacaatctcagtattatagtttctgcagttagtgaaagaagatctatttctagtaacatgaaagcttccataaggcttgtgttccacttctcacttgctgttttgaggctgcttgcatacattttggtcgtttctttgccacttggtaagtataattgcaactgcataatactttttctatattgtacaattcacattcagttactggaaaacttgtgccccttgtgaggattctgagtgtctttgcttcactgcttcagatatatgatatcgtcaaatattggtaaagttttgggcacttggagatgccggacttcatcattgtcaaggcttctatctgaaaattggactactgcatccgcgaggatcctgcgggcactgactgtgctcttgatagaatgctggcaacggcatggttggccgcacagagaaggagtctacctgatgaaatgcagagagcaagactatgtccaattcagaggtgttgtgcatcaaattgattttaaatgaatacacgtgctcaggtcgaaggtgaagctgggatggcactatgttttgtcatgaaaaggtgttaaggctgaaaagggaatccattgactatgtttcattgagctctgaaggtcataaggatt

SEQ ID NO: 3127 - DNA, 5511 bp, Triticum aestivum
gtaggatgtgtgcggggtgattggaagatccaactataaatattattgatactctcttaaaagatgggatggtgatcaccttgcaataaagagttattttttcgcgaatagcaataaagagttatttgatggcaaaaaaaaatcagatgatgtgggctggcctaggatatatagatatataacacttccccttttatattagaatacttaaacatttcgtacattgcatgttgttatatagcctgcaaaaaaggctttcgcgctgctttatataaaaagcaacatagtcaaactgatgtatggtgatgagaagatcgtcttataaaacagatcatatggaaaaacaagaaaacaatagagtgcacaccctatcacaaaacaatctagactacaactagggggagacttgcaccaagggaaaacgcatgacctcgttgcgcaactcgtaccaaggtgacaccagagagagcccctaccctcccgctcctgatcgtggagcctaagcctgcttgcggacaacaaggatcgcgatggatgccaataagggctcgtgtaaaaagataaggaggaaaaacgacagcccacgcgcgaagccaaggaaacttcgatccagcatccgaacatgcctgccaattggcgacacggtgcaccgaaggtaacctaggccccatgacgacgcccacaggagggagacgacgtaaggagtcgccatcgtcaaaaccgaagagacaatcaagggttttcatccggagccctggctccaagagagggaccacatcgacggccccaagagagatgcgacacccatgtgcatcactgccactagtgtcgaagcacaaggctttcgcctagagcctcttacaggcgtcacatcgaggaaccccgagcatcagcccacccgagggaagagatatcactaccaaacaaggcctccatggttctgggagccgtcactgccgaggcaccaccgacaccgggatcaccaagcgtggcatcctttgccatccacacaaccaaaagatgtccccaccaccgctgccaaggcgcctgctgaaaagccgctctgacggtccgccaccctaggccgccgctccggcgtccaatatcccaacctcgactccacacgcgggcaccaacccccgaaaaccgcactcaccggtggtgacacggaaagcgaaactactccatgcacgacgttcagtgaacgatctctggacgacaaggaatcaaatggctggagctgtactttgtctattcatgatcggtgtgatcaatagcgtcgtccacagatcgggcaaaggccgtcgtccgcataacatcgctccatggaaaggctcttcctttccagtcccacggcacaccacgccgacaccagcaccatctgcggcggtgaccactgaccagcgaacctaactcggtcaaggagaccaaacctggctgggagcacgctaccccatctgcctccaccccacagcacgagcacgggtgtccattcaggtacaacaggggatccacatcagaacatctccaacaatttgtatgttagtttgttggtaaaatatgccatgtcatcaaccaacaccgtaacatacaacaacttcaatggattatatctagcctgcccaatagaatgtgagataataaataaggtgctctctcattctacattggagcttgtgcaaggagtgttgattcatgtacatacaaccttcttctctttcttcatttattgtatgacacatcatcaaaaattctactacaccctttccgatttataaggcatgcacgtatccctaggtttataatttgagcaatataaaataagttgtatattctaaaaattacaccattagaaagtagaaaatctgaaatttttaataatatattttttgtgacaaatagcttgttttacgttggtttatttgtcaacctagatatacgtgcaagccctataaatcggaaaggaggtagtatgtgacaaagtctaccaagaaatatcttataactattgagatgcccttagcgagagctggctgccgattgactgatgaatgaacaaaaatcctatatgacaaagtctaccaagaactattttataactattgccgattgactgatgaatgaaccgttaccgtcttcttgtacagaagtaaacacttgtatacctccaccgccccgatgtcccgcctccgctccgcctccaccgcgccgatgccccgcctccgcctcctcagctgccgctcctactccatctccaccttgccgccgtcacgctcatggtctccccacgccgcctttgccgctgccacagagcgcgtcagcgctgggacgctcaccccggaggacgcacaccacctgttcgacgaattgctgcggcagtccactccggtccccgctcgatccctgaacggcttccttacggccctggcccgtgcgcgggacaccgacgcctgcagagacggccccgccctcgccctcgccctcttcaaccgcacccgccgagaagaggccggctcccgggtggtgtcgcccacaatcttcacctacggcatcctcatgaactgctgctgccacacgcttcgtccggatcttgggcttgccttctttgggcgcgtcctcaggatgggcctgaagacaaatgtggtcgtcgccaccacggtcctcaagtgcctctgcggcgccaaacggacagatgaggctgtgaacatcctgctacatcggatgtccgagctcgggtgtgtgcctgatgacttctcatattccattgttctgaagagcttatgtgatgatggcaggagccagcgagcacttgacctgctccagatgtgggagaaagaacgaggtgtctgctcccccaacgtagtggcatataacatagtcatccatggcttctttaaggaaggtgaagtaagcaaggcatgtgacctgttccatgcaatggtgcagcgaggggttgtgcctaatgtgatgacatataccttgactattgatgcgctgtgcaaggccagagctatggacaaagcaaagttgttcctccggcagatgattgataaaggtgttcgaccgaacaatgtgacatataatgtcatgatccatggatattccactctgggccagtggaaagaagcgggtaaagtgttcagagaaatgtcaagacagggtctcataccagatatcgttacttggacctcgttcatggcctctctctgcaagcatggaagaaccaaagaagctgccaatttttttgattccatgactgccaagggccacaagcctgatttggtcacgtatcatgttctgctccatgggtatggaaccgaaggatgctttgctgatatgattaatctcgttaattcgatggcaaccaaaggtattgttcccgatcgtcaggttttcaacattttaatcgatgcacatgctaaacatggaatgatggatgaagctatgcacatatttactggaatgcagggacaaggagtgtgtccagatgtatggacctattcaactataatatctgcactttgcagaatgggtaggctggctgatggtatggataacttcagccagatgattggtaagggagtagaaccgaacacagttgtttatcactccctaattcagggtttctctacacatggtgatttgaggaaagcgaaggagttggtttatgaaatgagaaacaaaggtattccttgtccaaacattgcattcttcacttctataatggacagtctatgcaaagaaggaagggttatggatgcacatgatatcttcaacttggttacagacataggtgagaaacctaacgtcattacgtttaatacgctgattgatggacattgcttagtcggtgagatggagaaagcatttggagtacttgattccatggtatcagctggcattgaggctgatgtttttacatataacacacttgcttatggctattgtagatgtggaaggattgatgatgggttgattctattcagagaaatgttgcgtaagaaacctaaacccacaacaattacatataacataatactggatgggttatttcgtgctgggagaacagttgctgcaaagaaaatgttccatgagatgatcgaagggggaataacagtgagcatgtccacgtacagtataatccttggaggactttgtaggaataattgtgctgaagaagcgatcaccctgtttcagaaattaggagcaatgaatgtgaaattggatattagaatactcaataccatgatcaatgcaatgttcaaggttcggagaagagaggaagctaacagtttgtttgctgcaatatcagccagtggaatggcacctaatgcttctacctacggcctaatgatagggaatcttctaaaagaaggatcagtgcaagaagccgaaaatatgttctcattaatggagaagagtggttgtgctccaggctctcgtcttataaataatatcatcagaatattattggaaaaaggtgacattgtcaaggctggaaattatatgtctaaagttgatggcaagaccatctcacttgaagcttcaactacttcgttgttgatgtgtctcttttcaagtaaagggagatatcgggaacaaatcaatttgctccctggaaattaccaatttttcaatggagtcagttgatgcaccggactagacagataaacattggcatggtttggagctctctctcaatgatgtcgacatgagttctgttccatgtgctcacaagatcgagctgagtgttcgtgttaccatagcgttttggcccgatgcatgcggctgctgggcgtgcatcctatggacatcgcccctaatctgcatgccatttccatgctcaaggttcgcatcctctcttcctcttaataatatgccagggctgttactaccccagggccttttcctctttattctccttttactttttgaggtcttcatgtttatagttagatgcctgtcattatacaccagaaaaactgtaagagttcctgaactagataccgtcataccgaacaagataacaacattaaacattcttaatacattttcttggtgcagatgtttatgtgatgacgtatgatcttaatctggaaagatctcttgtaggcatgccttgatgttgtttttccttatgttcgctagagggagcaatgtggccatccagttggcgaatttcacgttttcttctccactgatagcacaacctaagttgcacttgttatgaagatctttaattcattccatatgaatttgtcgcatatgttgttcctttttatgaattatatttatttggaattcgatcaagtaccgtagaatgtcgcccatctttggacagataactgttgacgtctcgaattttgcatttgtgtctccaagcactcttattttatcttccttgggcaaagttcttgttacattatgcacttgtgtcatccaagcactctcattttatcttccttgggaaaagttcttgctacattatgcacttgtgtcatccaagcagtc

SEQ ID NO: 3128 - DNA, 4833 bp, Triticum aestivum
gtgcagcgtgacccggtcgtgcccctctctagagataatgagcattgcatgtctaagttataaaaaattaccacatattttttttgtcacacttgtttgaagtgcagtttatctatctttatacatatatttaaactttactctacgaataatataatctatagtactacaataatatcagtgttttagagaatcatataaatgaacagttagacatggtctaaaggacaattgagtattttgacaacaggactctacagttttatctttttagtgtgcatgtgttctcctttttttttgcaaatagcttcacctatataatacttcatccattttattagtacatccatttagggtttagggttaatggtttttatagactaatttttttagtacatctattttattctattttagcctctaaattaagaaaactaaaactctattttagtttttttatttaataatttagatataaaatagaataaaataaagtgactaaaaattaaacaaataccctttaagaaattaaaaaaactaaggaaacatttttcttgtttcgagtagataatgccagcctgttaaacgccgtcgacgagtctaacggacaccaaccagcgaaccagcagcgtcgcgtcgggccaagcgaagcagacggcacggcatctctgtcgctgcctctggacccctctcgagagttccgctccaccgttggacttgctccgctgtcggcatccagaaattgcgtggcggagcggcagacgtgagccggcacggcaggcggcctcctcctcctctcacggcaccggcagctacgggggattcctttcccaccgctccttcgctttcccttcctcgcccgccgtaataaatagacaccccctccacaccctctttccccaacctcgtgttgttcggagcgcacacacacacaaccagatctcccccaaatccacccgtcggcacctccgcttcaaggtacgccgctcgtcctccccccccccccctctctaccttctctagatcggcgttccggtccatggttagggcccggtagttctacttctgttcatgtttgtgttagatccgtgtttgtgttagatccgtgctgctagcgttcgtacacggatgcgacctgtacgtcagacacgttctgattgctaacttgccagtgtttctctttggggaatcctgggatggctctagccgttccgcagacgggatcgatttcatgattttttttgtttcgttgcatagggtttggtttgcccttttcctttatttcaatatatgccgtgcacttgtttgtcgggtcatcttttcatgcttttttttgtcttggttgtgatgatgtggtctggttgggcggtcgttctagatcggagtagaattaattctgtttcaaactacctggtggatttattaattttggatctgtatgtgtgtgccatacatattcatagttacgaattgaagatgatggatggaaatatcgatctaggataggtatacatgttgatgcgggttttactgatgcatatacagagatgctttttgttcgcttggttgtgatgatgtggtgtggttgggcggtcgttcattcgttctagatcggagtagaatactgtttcaaactacctggtgtatttattaattttggaactgtatgtgtgtgtcatacatcttcatagttacgagtttaagatggatggaaatatcgatctaggataggtatacatgttgatgtgggttttactgatgcatatacatgatggcatatgcagcatctattcatatgctctaaccttgagtacctatctattataataaacaagtatgttttataattattttgatcttgatatacttggatgatggcatatgcagcagctatatgtggatttttttagccctgccttcatacgctatttatttgcttggtactgtttcttttgtcgatgctcaccctgttgtttggtgttacttctgcaggtctccaccatgcctcgcttctcctccagcacgccaatgtcgccaccacgcctccgcctcctcctcctcctccgacttggcgcccgccactcctcctccacctctcatccctcacgcatctgggatccccacgccgccttcgccgccgcgacgcagcgggctcgctctggcacgctcaccacggaggacgcacaccacctgttcgaagaattgctgcggcagggcaatcctgtccaggagcgtcccttgactaactttctggctgcccttgcccgcgcgcccgcgtccccattctgcagcgatggccccgccctggccgtcgccctcttcagccgtttgtcccgaggcgccggacgacgggtggcacagccaaatgttttcacctatggagtcctaatggactgctgctgccgtgcgcgccgcttggatctagcgatcgccttcttcgcccatctcctcaagacgggactggaggcaggccaagtcgttttcggcaccctcctcaagggactctgccacgcaaagcactcagatgaggctttggacgtggtgcttcacaggatgcctgagctaggctgcacccccgacgtggtggcctataccacggtcatccacggcttcttgaaggaaggccaagtaggcaaggcatgcaatctattccatggaatggcgcagcagggcgttgcgcctgatgtggtgacatatagctcagttattgatgcgctgtgcaaggccagagcaattgacaaggcagagtatttccttcgtgaaatggttgataatggtgtcgtacctaataatgtgacatataatagcctcatccatggatattcctctttgggccatcagaaggaggctgttagggtgctgaaagaaatgacaagacagggtatcatacctgatgtttttacttgcaactcggtcatggcctccctttgcaagaacggaaaaagcaaagaagctgcaaaaatgtttgattcaatgtccatgaagggcctgaaacctaacaccgtttcatatgttattctccttcatgggtatgccactgaaggatgcctagttgacatgatcaatctcttcaattccatggcaacagactgtattctacctaactgtcatatattcaacatactgatttatgcatatgctaaatctgggaagctcgacaaggctatgcttatatttaaagaaatgcagaaacaaggagtgagtccagatgcagtcacatattcaaccgtaatacatgcattttgcaaaaagggtaggttggatgatgctgtgataaagtttaatcagatgattgatacaggagtacgaccggacgcatctgtttatcgttccctaatccagggtttttgtacacatggcgatttggtgaaagcaaaggaatatgttactgaaatgatgaagaaaggtatgcttcctcctgatattatgttcttcagttcaatcatgcagaacctatgcacagaaggaagggtaatagaagcacgagatatccttgacttgatagtgtgcattggtatgaggcctgatgttttcatatttaatatactgatcggcggatactgcctagtccgcaagatggcagatgcatcaaaaatatttgatgatatggtgtcatatggtttagaaccttgtaatattacgtatggtatacttattaatggctattgcaaaaacggaaggattgatgacgggcttattctgttcaaggagatgctgcacaagggacttaaacctacaacttttaattataacgtcatactggatggattatttctggctagacaaactgttgctgcaaaggtgaagtttcatgagatggctgaatctggagtaagtgtgtgcattgatacatactctatagttcttggtggactttgtagaaataattgcatcggtgaagcaatcacgctatttcagaaattaagtacaatgaatgttaaattcaatattgcaattgtcaatatcatgattggtgcattcttcagggttcggcgaaaccaggaagctaaggatttgtttgctgcagtatcagccaatggtttggtagctaatgtctttacctacactgtaatgatgataaatcttatagaagaagggtcactggaagaagctgacactctctttttatcaatgaagaagtccggctgtactgccaactcttgtatgttaaatcatattatcagaaggttactggaaagaggagagatagtcaaggctggaaattatatgtcgaaagttgatgcaaagagctactcacttgaagctaaaactgttttgctgctgatctctctcttttcagggaatgggaaatatagagaacacataaaattgctccctatgaagtatcagtttctcgaagaagcagccacagttgaatagaacgcatccatggacgtggattgaattgaaggtgtactactgctgtgctggtccgtggatcgtggctgtcatgcatggtttgctgtgtcttctacgatatgtacttccctttgttccgtatatgtacatcttcctcgtttggttcatgtattttcctttgaataataataaataaatcgggctttccatatcggatgcttttatatctgtgtgtatggagattgtggtatatggtttcatctcaagttgtttacgtcaagaactaaagatatttcctcaaaaaaaaagaactaaagatataatcaatgtcattaacataactcatttccatgaggagaggacgaaggacgaagtcataataagtagattggttgatattttataatcattcaaaactgcaggggttataagatcttcattttgtagaagttttagatcttccgaggggttctc

SEQ ID NO: 3129 - DNA, 4833 bp, Triticum aestivum
gtgcagcgtgacccggtcgtgcccctctctagagataatgagcattgcatgtctaagttataaaaaattaccacatattttttttgtcacacttgtttgaagtgcagtttatctatctttatacatatatttaaactttactctacgaataatataatctatagtactacaataatatcagtgttttagagaatcatataaatgaacagttagacatggtctaaaggacaattgagtattttgacaacaggactctacagttttatctttttagtgtgcatgtgttctcctttttttttgcaaatagcttcacctatataatacttcatccattttattagtacatccatttagggtttagggttaatggtttttatagactaatttttttagtacatctattttattctattttagcctctaaattaagaaaactaaaactctattttagtttttttatttaataatttagatataaaatagaataaaataaagtgactaaaaattaaacaaataccctttaagaaattaaaaaaactaaggaaacatttttcttgtttcgagtagataatgccagcctgttaaacgccgtcgacgagtctaacggacaccaaccagcgaaccagcagcgtcgcgtcgggccaagcgaagcagacggcacggcatctctgtcgctgcctctggacccctctcgagagttccgctccaccgttggacttgctccgctgtcggcatccagaaattgcgtggcggagcggcagacgtgagccggcacggcaggcggcctcctcctcctctcacggcaccggcagctacgggggattcctttcccaccgctccttcgctttcccttcctcgcccgccgtaataaatagacaccccctccacaccctctttccccaacctcgtgttgttcggagcgcacacacacacaaccagatctcccccaaatccacccgtcggcacctccgcttcaaggtacgccgctcgtcctccccccccccccctctctaccttctctagatcggcgttccggtccatggttagggcccggtagttctacttctgttcatgtttgtgttagatccgtgtttgtgttagatccgtgctgctagcgttcgtacacggatgcgacctgtacgtcagacacgttctgattgctaacttgccagtgtttctctttggggaatcctgggatggctctagccgttccgcagacgggatcgatttcatgattttttttgtttcgttgcatagggtttggtttgcccttttcctttatttcaatatatgccgtgcacttgtttgtcgggtcatcttttcatgcttttttttgtcttggttgtgatgatgtggtctggttgggcggtcgttctagatcggagtagaattaattctgtttcaaactacctggtggatttattaattttggatctgtatgtgtgtgccatacatattcatagttacgaattgaagatgatggatggaaatatcgatctaggataggtatacatgttgatgcgggttttactgatgcatatacagagatgctttttgttcgcttggttgtgatgatgtggtgtggttgggcggtcgttcattcgttctagatcggagtagaatactgtttcaaactacctggtgtatttattaattttggaactgtatgtgtgtgtcatacatcttcatagttacgagtttaagatggatggaaatatcgatctaggataggtatacatgttgatgtgggttttactgatgcatatacatgatggcatatgcagcatctattcatatgctctaaccttgagtacctatctattataataaacaagtatgttttataattattttgatcttgatatacttggatgatggcatatgcagcagctatatgtggatttttttagccctgccttcatacgctatttatttgcttggtactgtttcttttgtcgatgctcaccctgttgtttggtgttacttctgcaggtctccaccatgcctcgcttctcctccaccacgccaatgtcgccaccccgcctcctcctccggctcggcgcccgccactcctcctccacctctcatccctcacgcatctgggatccccacgccgccttcgccgctgcgacgcagcgggcgcgctctggcacgctcaccacggaggacgcacaccacctgtttgatgaattgctgcggcagggcaatcctgtccaggagcgtcccttgactaactttctggctgccctcgcccgcgcgcccgcgtccgcattctgcagcgatggccctgccctggccgtcgccctcttcggccgtttgtcccgaggcgccggacgacgggtggcgcagccaaatgtcttcacctatggcgtcctcatggactgctgctgccgtgcgcgccgcctggatctagcgatcgccttcttcgcccgtctcctcaagacgggactggaggcaaaccaagtcatcttctgcaccctcctcaagggactctgccacgcaaagcgctcagatgaggctttggacgtggtgcttcacaggatgcctgagctaggctgcacccccaacgtggtggcctataccacggtcatccacggcttcttgaaggaaggccaagtaggcaaggcatgcaatctattccatggaatggcgcagcagggcgttgcgcctgatgtggtgacatataactcggttatcgatgcgttgtgcaaggccagagcaatggacaaggcagagtatttccttcgtgaaatggttgataatggtgtcgtacctaataatgtgacatataatagcctcatccatggatattcctctttgggccatcagaaggaggctgttagggtgctgaaagaaatgacaagacagggtatcataccagatgtcattacctgcacctcactcatgaccttcctttgcaagaatggaaaaagcaaggaagctgcagaaatttttgattcaatggccacgaagggcctgaaacatgacgccgtttcatatgctattctccttcatgggtatgccactgaaggatgcttggttgatatgattaatctcttcaattcgatggacagagactgtattctacctaactgtcatatcttcaacatactgatttatgcatatgctaaatctgggaagcttgataaggctatgcttatatttagagatatgcagaaacaaggagtgagcccagatgcattcacatattcaaccttaatacatgcattttgtaaaaagggtcggttggacgatgctatgataaagtttaatcagatggttgatacaggagtacgacagggcacagctgtttatggttctctaatccagggtttttgtacacacggcgatttggtgaaaggaaaggaattggttactgaaatgatgaacaaaggtatacctcctcctgacattatgttcttccattcaatcatgcagaacctatgcacagaaggaagggtagtagaagcacgggatatccttggcttgatagcacacataggtatgaggcctaatgtttgcacatttaatatactgattggtggatactgcctagtccgcaagatggaggatgcctcaaaaatatttcatgatatgatgtcatatggtttagaaccttctaatgttacgtatggtattcttattaatggctattgcaaaaacagaaggattgatgacgggctgattctgttcaaagaaatgttgcgcaagggacttaaacctacaacttttaattacaacatcatactggatggattatttctggctggacgaactgttgctgcaaaggaaaagtttgatgagatggttgaatctggagtaagtatgtgcatcagtacttactctatagttcttcgtggactttgtagaaataattgtagcggcgaagccatcacgctattccagacattaagcgcaatggatgtgaaattcaatattagaattgtcaatatcatgattgatgccttcttcagggttcagcgaaagcaagaagctaaggatttgtttgctgcaataacagccaatgggttggttgctaatgtttttacctacagcctaatgatgacaaatcttataaaagaagggtcagtggaagaggctgacacactctttttatcgatggagatgagcggctgtacttcgaactcgtggatgttaaatcttattatcagagggttgctggaaaaaggagagatagtcaaggctggatgttatatgtctaaagttgatgccaagagctactcacttgaagctaaaactgtttcgttgctgatctatctcttttcagggaaagggaaatacagagaacacataagattgctacctacaaagtatcagtttctcgaagaagcagccacagttgaatggtttgctatatagaacgcatccatggacgtggattgaattgaaggtgtactactgctgtgctggtccgtggatcgtggctgtcatgcatggtttgctgtgtcttctacgatatgtacttccctttgttccgtatatgtacatcttcctcgtttggttcatgtattttcctttgaataataataaataaatcgggctttccatatcggatgcttttatatctgtgtgtatggagattgtggtatatggtttcatctcaagttgtttacgtcaagaactaaagatatttcctcaaaaaaaaagaactaaagatataatcaatgtcattaacataactcatttccatgaggagaggacgaaggacgaagtcataataagtagattggttgatattttataatcattcaaaactgcaggggttataagatcttcattttgtagaagttttagatcttccgaggggttctc

SEQ ID NO: 3130 - DNA, 4812 bp, Triticum aestivum
gtgcagcgtgacccggtcgtgcccctctctagagataatgagcattgcatgtctaagttataaaaaattaccacatattttttttgtcacacttgtttgaagtgcagtttatctatctttatacatatatttaaactttactctacgaataatataatctatagtactacaataatatcagtgttttagagaatcatataaatgaacagttagacatggtctaaaggacaattgagtattttgacaacaggactctacagttttatctttttagtgtgcatgtgttctcctttttttttgcaaatagcttcacctatataatacttcatccattttattagtacatccatttagggtttagggttaatggtttttatagactaatttttttagtacatctattttattctattttagcctctaaattaagaaaactaaaactctattttagtttttttatttaataatttagatataaaatagaataaaataaagtgactaaaaattaaacaaataccctttaagaaattaaaaaaactaaggaaacatttttcttgtttcgagtagataatgccagcctgttaaacgccgtcgacgagtctaacggacaccaaccagcgaaccagcagcgtcgcgtcgggccaagcgaagcagacggcacggcatctctgtcgctgcctctggacccctctcgagagttccgctccaccgttggacttgctccgctgtcggcatccagaaattgcgtggcggagcggcagacgtgagccggcacggcaggcggcctcctcctcctctcacggcaccggcagctacgggggattcctttcccaccgctccttcgctttcccttcctcgcccgccgtaataaatagacaccccctccacaccctctttccccaacctcgtgttgttcggagcgcacacacacacaaccagatctcccccaaatccacccgtcggcacctccgcttcaaggtacgccgctcgtcctccccccccccccctctctaccttctctagatcggcgttccggtccatggttagggcccggtagttctacttctgttcatgtttgtgttagatccgtgtttgtgttagatccgtgctgctagcgttcgtacacggatgcgacctgtacgtcagacacgttctgattgctaacttgccagtgtttctctttggggaatcctgggatggctctagccgttccgcagacgggatcgatttcatgattttttttgtttcgttgcatagggtttggtttgcccttttcctttatttcaatatatgccgtgcacttgtttgtcgggtcatcttttcatgcttttttttgtcttggttgtgatgatgtggtctggttgggcggtcgttctagatcggagtagaattaattctgtttcaaactacctggtggatttattaattttggatctgtatgtgtgtgccatacatattcatagttacgaattgaagatgatggatggaaatatcgatctaggataggtatacatgttgatgcgggttttactgatgcatatacagagatgctttttgttcgcttggttgtgatgatgtggtgtggttgggcggtcgttcattcgttctagatcggagtagaatactgtttcaaactacctggtgtatttattaattttggaactgtatgtgtgtgtcatacatcttcatagttacgagtttaagatggatggaaatatcgatctaggataggtatacatgttgatgtgggttttactgatgcatatacatgatggcatatgcagcatctattcatatgctctaaccttgagtacctatctattataataaacaagtatgttttataattattttgatcttgatatacttggatgatggcatatgcagcagctatatgtggatttttttagccctgccttcatacgctatttatttgcttggtactgtttcttttgtcgatgctcaccctgttgtttggtgttacttctgcaggtctccaccatgtcgccactccgcctccgcctccgcctccggccccgcctccatgcccgccactcctactccacctcgcatcccccacgcggccagggctgggatccccacgcctccttcgcagctgccacggagcgcgcgcgatctggcaacctctcctcggaggacgcacaccacctgttcgaccaattgctcctgcaggctaatccggtcaacatgcgccttccgaacgaccttctcaccgccctggctcgcgcacctgcgtccgcatcctgcagcaacggccccgccctcgccgtcgccctcttcagccgtttgtcccaaggtgcccgccaacgggtggtgcagccaacggcctgcacctacggcatcctcatggactgctgctgccgcgcaaaccgccaggatctggcgctcgccttcttcgcccgtctcctcaggacgggactcaaggcaggcgtcatagaagtcaacactcttctcaagggactctgccgtgcaaagcgggctgatgaggctctggacattctgcttcacaggatgcctgagctaggctgcacccccaacgtggtggcatataacacggtcatccatggcttcttccaagaaggccaagcaggcaaggcgtgcagcttgttccatgaaatggcgcagcagggcgttgcgcctagtttggtgacatataactcggttattgatgcgctgtgcaaggccagagccatggacaaggcagagtatttccttggtcagatggttgatgatggtgtcatacctgataatgtgacatataatagcctcatccatggatattcctcttcaggccactggaaggaggcagttagggtattcaaagagatgacaagtcggagggttaaaccaaatgtgcatactcacaacatgtttatgacctttctttgcaaacatggaagaagcaaagaagctgcaggaatttttgataccatggctatgaagggcctgaaacataacaacgtttcatatgctattctccttcacgggtatgccaccgaaggatgcttagttgatatgattaatctcttcaattcaatggaaagatactgcattctacctgactgtcgtatcttcaacatactgattcatgcacatgctaaatctgggaagcttgataaggccatgcttatcttcaatgaaatgcagaaacaaggagtgagtccaaatgcagtcacatattcaaccataatacatgcattttgcaaaaagggtaggttggacgatgctgtgataaagtttaatcagatgattgatacaggagtacgacagggcacagctgtttatcgttccctaatccagggtttttgtacacacggcgattcggtgaaagcaaaggaattgctcactgaaatgatgaacaaaggtatgcttcctcctgatattgcattcttcaattcaatcatgcagaacctttgcacagaaggaagggtaatagaagcacgggatgtccttggcttgatagcgcacataggtatgaggcctgatgtttgcacatttaatatactgatcggtggatactgcctagtcggcaagatggaacatgcctcaaaaatatttgatgatatgatgtcatatggcttagaaccttctaatattacgtatggtatacttattaatggctattgcaaaaatagaaggattgatgacgggcttattctgttcaaagagatgctgcacaagggacttaaacctacaacttttaattataacgtcatactggatggattatttctggctggacgaactgttgctgcaaaggaaaagtttgatgagatggttgaatctggagtaagtgtgtgcattggtacatattcgatagttcttggtggactttgtagaaataattgtagcggcgaagcaatcacgctattccagaaattaagcacaatggatgtgaaattcaatattataattgtcaatataatgattgatgctttctacaaggttcagcgaaaccaagaagccaaggatttgtttgctgcagtatcagccaatggtttggtagctaatgtctttacctacaccataatgatgaaaaatcttataaaagaagggtcagtggaagaagctgacgatctctttttatcaatggagaagtccggctgtactgctgactcttatatgttaaatcttatcgtcagaatgttactgggaaaaggagagatagtcaaggctgggaattatatatctaaaattgatgcaaagagctactcacttgaagctaaaactgtttcgctgcttatctctctcttttcagggaaagggaaatatagagaacacataggattgctccctgcaaagtatcggtttcgtgaagaagcagctacagttgtgtagaacgcatccatggacgtggattgaattgaaggtgtactactgctgtgctggtccgtggatcgtggctgtcatgcatggtttgctgtgtcttctacgatatgtacttccctttgttccgtatatgtacatcttcctcgtttggttcatgtattttcctttgaataataataaataaatcgggctttccatatcggatgcttttatatctgtgtgtatggagattgtggtatatggtttcatctcaagttgtttacgtcaagaactaaagatatttcctcaaaaaaaaagaactaaagatataatcaatgtcattaacataactcatttccatgaggagaggacgaaggacgaagtcataataagtagattggttgatattttataatcattcaaaactgcaggggttataagatcttcattttgtagaagttttagatcttccgaggggttctc

SEQ ID NO: 3131 - DNA, 4680 bp, Triticum aestivum
gtgcagcgtgacccggtcgtgcccctctctagagataatgagcattgcatgtctaagttataaaaaattaccacatattttttttgtcacacttgtttgaagtgcagtttatctatctttatacatatatttaaactttactctacgaataatataatctatagtactacaataatatcagtgttttagagaatcatataaatgaacagttagacatggtctaaaggacaattgagtattttgacaacaggactctacagttttatctttttagtgtgcatgtgttctcctttttttttgcaaatagcttcacctatataatacttcatccattttattagtacatccatttagggtttagggttaatggtttttatagactaatttttttagtacatctattttattctattttagcctctaaattaagaaaactaaaactctattttagtttttttatttaataatttagatataaaatagaataaaataaagtgactaaaaattaaacaaataccctttaagaaattaaaaaaactaaggaaacatttttcttgtttcgagtagataatgccagcctgttaaacgccgtcgacgagtctaacggacaccaaccagcgaaccagcagcgtcgcgtcgggccaagcgaagcagacggcacggcatctctgtcgctgcctctggacccctctcgagagttccgctccaccgttggacttgctccgctgtcggcatccagaaattgcgtggcggagcggcagacgtgagccggcacggcaggcggcctcctcctcctctcacggcaccggcagctacgggggattcctttcccaccgctccttcgctttcccttcctcgcccgccgtaataaatagacaccccctccacaccctctttccccaacctcgtgttgttcggagcgcacacacacacaaccagatctcccccaaatccacccgtcggcacctccgcttcaaggtacgccgctcgtcctccccccccccccctctctaccttctctagatcggcgttccggtccatggttagggcccggtagttctacttctgttcatgtttgtgttagatccgtgtttgtgttagatccgtgctgctagcgttcgtacacggatgcgacctgtacgtcagacacgttctgattgctaacttgccagtgtttctctttggggaatcctgggatggctctagccgttccgcagacgggatcgatttcatgattttttttgtttcgttgcatagggtttggtttgcccttttcctttatttcaatatatgccgtgcacttgtttgtcgggtcatcttttcatgcttttttttgtcttggttgtgatgatgtggtctggttgggcggtcgttctagatcggagtagaattaattctgtttcaaactacctggtggatttattaattttggatctgtatgtgtgtgccatacatattcatagttacgaattgaagatgatggatggaaatatcgatctaggataggtatacatgttgatgcgggttttactgatgcatatacagagatgctttttgttcgcttggttgtgatgatgtggtgtggttgggcggtcgttcattcgttctagatcggagtagaatactgtttcaaactacctggtgtatttattaattttggaactgtatgtgtgtgtcatacatcttcatagttacgagtttaagatggatggaaatatcgatctaggataggtatacatgttgatgtgggttttactgatgcatatacatgatggcatatgcagcatctattcatatgctctaaccttgagtacctatctattataataaacaagtatgttttataattattttgatcttgatatacttggatgatggcatatgcagcagctatatgtggatttttttagccctgccttcatacgctatttatttgcttggtactgtttcttttgtcgatgctcaccctgttgtttggtgttacttctgcaggtctccaccatgcctcgcttctccaccaccacgccaatgtcgccaccccgcctcctcctccgactcggcgcccgccactcctcctccacctctcatccctcacgcatctgggatccccacgccgccttcgccgctgcgacgcagcgggcgcgctctggcacgctcaccacggaggacgcacaccacctgtttgatgaattgctgcggcagggcaatcctgtccaggagcgtcccttgactaactttctggctgccctcgcccgcgcgcccgcgtccgcattctgcagcgatggccctgccctggccgtcgccctcttcggccgtttgtcccgaggcgccggacgacgggtggcgcagccaaatgtcttcacctatggcgtcctcatggactgctgctgccgtgcgcgccgcctggatctagcgatcgccttcttcgcccgtctcctcaagacgggactggaggcaaaccaagtcatcttctgcaccctcctcaagggactctgccacgcaaagcgctcagatgaggctttggacgtggtgcttcacaggatgcctgagctaggctgcacccccaacgtggtggcctataccacggtcatccacggcttcttgaaggaaggccaagtaggcaaggcatgcaatctattccatggaatggcgcagcagggcgttgcgcctgatgtggtgacatataactcggttatcgatgcgttgtgcaaggccagagcaatggacaaggcagagtatttcctttgtgaaatggttgataatggtgtcgtacctaataatgtgacatataatagcctcatccatggatattcctctttgggccatcagaaggaggctgttagggtgctgaaagaaatgacaagacagggtatcataccagatgtcattacctgcacctcactcatgaccttcctttgcaagaatggaaaaagcaaggaagctgcagaaatttttgattcaatgcccacgaagggcctgaaacatgacgccgtttcatatgctattctccttcatgggtatgccactgaaggatgcttggttgatatgattaatctcttcaattcgatggacagagactgtattctacctaactgtcatatcttcaacatactgatttatgcatatgctaaatctgggaagcttgataaggctatgcttatatttagagatatgcagaaacaaggagtgagtccagatgcagtcacatattcaaccgtaatacatgcattttgcaaaaagggtaggttggatgatgctgtgataaagtttaatcagatgattgatacaggagtacgaccggaagcatctgcttatcgttccctaatccagggtttttgtacacatggcgatttggtgaaagcaaaggaatatgttactgaaatgatgaagaaaggtatgcttcctcctgatattatgttcttcagttcaatcatgcagaaactatgcacagaaggaagggtaatagaagcacgagatatccttgacttgatagtgcgcattggtatgaggcctaatgttttcatatttaatatactgatcggtgggtactgcctagtctgcaagatggaggatgcaacaaaaatgtttgaggatatggtgtcatttggtttagaaccttgtaatattacgtatggtatacttattaatggctattgcaaaaatagaaggattgatgatgggcttattctgttccaagagatgctgcacaagggacttaaacctacaacttttaattataatgtcatactggatgggttatttctggctggacgaactgttgctgcaaaggaaaagtttgatgagatggttgaatctggagtaagtgtgtgcagtgatacatattcgatagttcttgctggactttgcagaaataattgctctagcgaagtaatcatgctgttccagaaattaagggcaatgaacatgaaattcaatattagaattgtcactatcatgattgatgccttctacaaggttcggcgaaaccaagaagctaaggatttgtttgctgcaataccatccaatggcttggtagctaatgttgttacctacagcataatgatgaaaagtcttataaaagaaggttcagtggaagaagctgacactctttttatcgatggagaggagcggctgtactgcaaactcttggatgttaaatcatattatcagaaggttactggaaagaggagagatagtcaaggctggaaattatatgtcgaaagttgaaacgcatccatggacgtggattgaattgaaggtgtactactgctgtgctggtccgtggatcgtggctgtcatgcatggtttgctgtgtcttctacgatatgtacttccctttgttccgtatatgtacatcttcctcgtttggttcatgtattttcctttgaataataataaataaatcgggctttccatatcggatgcttttatatctgtgtgtatggagattgtggtatatggtttcatctcaagttgtttacgtcaagaactaaagatatttcctcaaaaaaaaagaactaaagatataatcaatgtcattaacataactcatttccatgaggagaggacgaaggacgaagtcataataagtagattggttgatattttataatcattcaaaactgcaggggttataagatcttcattttgtagaagttttagatcttccgaggggttctc

SEQ ID NO: 3132 - DNA, 5078 bp, Triticum aestivum
gtaggatgtgtgcggggtgattggaagatccaactataaatattattgatactctcttaaaagatgggatggtgatcaccttgcaataaagagttattttttcgcgaatagcaataaagagttatttgatggcaaaaaaaaatcagatgatgtgggctggcctaggatatatagatatataacacttccccttttatattagaatacttaaacatttcgtacattgcatgttgttatatagcctgcaaaaaaggctttcgcgctgctttatataaaaagcaacatagtcaaactgatgtatggtgatgagaagatcgtcttataaaacagatcatatggaaaaacaagaaaacaatagagtgcacaccctatcacaaaacaatctagactacaactagggggagacttgcaccaagggaaaacgcatgacctcgttgcgcaactcgtaccaaggtgacaccagagagagcccctaccctcccgctcctgatcgtggagcctaagcctgcttgcggacaacaaggatcgcgatggatgccaataagggctcgtgtaaaaagataaggaggaaaaacgacagcccacgcgcgaagccaaggaaacttcgatccagcatccgaacatgcctgccaattggcgacacggtgcaccgaaggtaacctaggccccatgacgacgcccacaggagggagacgacgtaaggagtcgccatcgtcaaaaccgaagagacaatcaagggttttcatccggagccctggctccaagagagggaccacatcgacggccccaagagagatgcgacacccatgtgcatcactgccactagtgtcgaagcacaaggctttcgcctagagcctcttacaggcgtcacatcgaggaaccccgagcatcagcccacccgagggaagagatatcactaccaaacaaggcctccatggttctgggagccgtcactgccgaggcaccaccgacaccgggatcaccaagcgtggcatcctttgccatccacacaaccaaaagatgtccccaccaccgctgccaaggcgcctgctgaaaagccgctctgacggtccgccaccctaggccgccgctccggcgtccaatatcccaacctcgactccacacgcgggcaccaacccccgaaaaccgcactcaccggtggtgacacggaaagcgaaactactccatgcacgacgttcagtgaacgatctctggacgacaaggaatcaaatggctggagctgtactttgtctattcatgatcggtgtgatcaatagcgtcgtccacagatcgggcaaaggccgtcgtccgcataacatcgctccatggaaaggctcttcctttccagtcccacggcacaccacgccgacaccagcaccatctgcggcggtgaccactgaccagcgaacctaactcggtcaaggagaccaaacctggctgggagcacgctaccccatctgcctccaccccacagcacgagcacgggtgtccattcaggtacaacaggggatccacatcagaacatctccaacaatttgtatgttagtttgttggtaaaatatgccatgtcatcaaccaacaccgtaacatacaacaacttcaatggattatatctagcctgcccaatagaatgtgagataataaataaggtgctctctcattctacattggagcttgtgcaaggagtgttgattcatgtacatacaaccttcttctctttcttcatttattgtatgacacatcatcaaaaattctactacaccctttccgatttataaggcatgcacgtatccctaggtttataatttgagcaatataaaataagttgtatattctaaaaattacaccattagaaagtagaaaatctgaaatttttaataatatattttttgtgacaaatagcttgttttacgttggtttatttgtcaacctagatatacgtgcaagccctataaatcggaaaggaggtagtatgtgacaaagtctaccaagaaatatcttataactattgagatgcccttagcgagagctggctgccgattgactgatgaatgaacaaaaatcctatatgacaaagtctaccaagaactattttataactattgccgattgactgatgaatgaaccgttaccgtcttcttgtacagaagtaaacacttgtatacctccaccgccccgatggtccgtcctgtagaaaccccaacccgtgaaatcaaaaaactcgacggcctgtgggcattcagtctggatcgcgaaaactgtggaattggtcagcgttggtgggaaagcgcgttacaagaaagccgggcaattgctgtgccaggcagttttaacgatcagttcgccgatgcagatattcgtaattatgcgggcaacgtctggtatcagcgcgaagtctttataccgaaaggttgggcaggccagcgtatcgtgctgcgtttcgatgcggtcactcattacggcaaagtgtgggtcaataatcaggaagtgatggagcatcagggcggctatacgccatttgaagccgatgtcacgccgtatgttattgccgggaaaagtgtacgtaagtttctgcttctacctttgatatatatataataattatcattaattagtagtaatataatatttcaaatatttttttcaaaataaaagaatgtagtatatagcaattgcttttctgtagtttataagtgtgtatattttaatttataacttttctaatatatgaccaaaatttgttgatgtgcaggtatcaccgtttgtgtgaacaacgaactgaactggcagactatcccgccgggaatggtgattaccgaggaaaacggcaagaaaaagcagtcttacttccatgatttctttaactatgccggaatccatcgcagcgtaatgctctacaccacgccgaacacctgggtggacgatatcaccgtggtgacgcatgtcgcgcaagactgtaaccacgcgtctgttgactggcaggtggtggccaatggtgatgtcagcgttgaactgcgtgatgcggatcaacaggtggttgcaactggacaaggcactagcgggactttgcaagtggtgaatccgcacctctggcaaccgggtgaaggttatctctatgaactgtgcgtcacagccaaaagccagacagagtgtgatatctacccgcttcgcgtcggcatccggtcagtggcagtgaagggcgaacagttcctgattaaccacaaaccgttctactttactggctttggtcgtcatgaagatgcggacttgcgtggcaaaggattcgataacgtgctgatggtgcacgaccacgcattaatggactggattggggccaactcctaccgtacctcgcattacccttacgctgaagagatgctcgactgggcagatgaacatggcatcgtggtgattgatgaaactgctgctgtcggctttaacctctctttaggcattggtttcgaagcgggcaacaagccgaaagaactgtacagcgaagaggcagtcaacggggaaactcagcaagcgcacttacaggcgattaaagagctgatagcgcgtgacaaaaaccacccaagcgtggtgatgtggagtattgccaacgaaccggatacccgtccgcaaggtgcacgggaatatttcgcgccactggcggaagcaacgcgtaaactcgacccgacgcgtccgatcacctgcgtcaatgtaatgttctgcgacgctcacaccgataccatcagcgatctctttgatgtgctgtgcctgaaccgttattacggatggtatgtccaaagcggcgatttggaaacggcagagaaggtactggaaaaagaacttctggcctggcaggagaaactgcatcagccgattatcatcaccgaatacggcgtggatacgttagccgggctgcactcaatgtacaccgacatgtggagtgaagagtatcagtgtgcatggctggatatgtatcaccgcgtctttgatcgcgtcagcgccgtcgtcggtgaacaggtatggaatttcgccgattttgcgacctcgcaaggcatattgcgcgttggcggtaacaagaaagggatcttcactcgcgaccgcaaaccgaagtcggcggcttttctgctgcaaaaacgctggactggcatgaacttcggtgaaaaaccgcagcagggaggcaaacaatgatgatgcaccggactagacagataaacattggcatggtttggagctctctctcaatgatgtcgacatgagttctgttccatgtgctcacaagatcgagctgagtgttcgtgttaccatagcgttttggcccgatgcatgcggctgctgggcgtgcatcctatggacatcgcccctaatctgcatgccatttccatgctcaaggttcgcatcctctcttcctcttaataatatgccagggctgttactaccccagggccttttcctctttattctccttttactttttgaggtcttcatgtttatagttagatgcctgtcattatacaccagaaaaactgtaagagttcctgaactagataccgtcataccgaacaagataacaacattaaacattcttaatacattttcttggtgcagatgtttatgtgatgacgtatgatcttaatctggaaagatctcttgtaggcatgccttgatgttgtttttccttatgttcgctagagggagcaatgtggccatccagttggcgaatttcacgttttcttctccactgatagcacaacctaagttgcacttgttatgaagatctttaattcattccatatgaatttgtcgcatatgttgttcctttttatgaattatatttatttggaattcgatcaagtaccgtagaatgtcgcccatctttggacagataactgttgacgtctcgaattttgcatttgtgtctccaagcactcttattttatcttccttgggcaaagttcttgttacattatgcacttgtgtcatccaagcactctcattttatcttccttgggaaaagttcttgctacattatgcacttgtgtcatccaagcagtctacaacagggggttgtgcctaatgagggtgacata

SEQ ID NO: 3133 - DNA, 585 bp, Triticum aestivum
atggatgaagtgagcaagttactagaaaatatgtgctcaattggcttgaaactggatgttgtcacctatagcatactgatagatggttactctaagaatggaaggatagatgatgcattggttgttttcagggaaatgatggacgggaaggttgagccttctgttatcacttttaatattatgattggtgcattgcttaaaggtggcaggaaggaagaagccacagatttgtttaatggtatctggcccaaaggattagtgcccgatgttgttacatatagcttaatgatacaaaaactaatagaagaaggttctctacaagagtctgatgatctattcctttctatggagaagaatggatgtgctgccaactcacatatgctaaatgctatagttagaagcttacttcagaaaggggagattcctagggctgggacttatctgtctaaaattgatgagaggaggttcacctttgaagcttccacagctagcttgttggctgcacttgcgtcaggggggaaaggccaggaatataaggagttactccccgaaaaataccactattttctggaacagggcgctgat

SEQ ID NO: 3134 - DNA, 978 bp, Triticum aestivum; identical to SEQ ID NO: 3108

SEQ ID NO: 3135 - protein, 700 aa, Triticum aestivum
NIKARYHAGDIGTEDALHLFDELLQVAGRSSIHAINCLLTVVGRDCPALGVSLFNRVARAKVAPCSITYAILVDCCCRTGRQDLGFAAMGHVIKMGFTADAMITFSHLLKAICAENKTSYAMDIVLRIMPMFNCIPDVFSYNILFKGLCNEKRSQEALELIQVMVEHGGRCQPDVVSYSTVIDGLLKEGLVGKVYILFCEMIQRGISPNAVTYNSIISGMCKVHAMDKAEQVLQQMPDRGILPNVATYTSLIHGYFSLGQCKEVDRIFKEMSRNGVQPNVVTYNIQMDYLCKNGRCAEARKIFDSMVSLGQKPTVTTYSILLHGYALERSFHEIHCLIDLMVGNGIAPNHFLYNILISAYAKEEMIGEVMHIFKKMRQHGLNPNVATYGAVVNLLSKIGRMDDAMSQFNQMITEGLAPDIIVFTLLISGFCSCGKWEKVDELFSEMLDRGICPNTVFFNIIMDCLCKNERVMEAQDLFDLMVHMGVKPDVCTYNTLIGGYLFIGKMDEVRKLLDNMVSIGLKPNVITYSILIDGYSKNGSIDDALVVSREMLAGKVKPCVITFNIMIGALLKCGRKAEAKDLFDGIWANGLVPDVITYSLMIQKLIEEGSLQESDDLFLSMEKNGCVADSHMLNAIVRSLLQKGEVPRAGTYLSKIDERRFTFEASTASLLVALASGRKSQEYKELLPEKYHYFLEEGTD

SEQ ID NO: 3136 - protein, 711 aa, Triticum aestivum
MSRRFVPVGRRILEQNIKARYHAGDIGTEDALHLFDELLQVAGRSSIHAINCLLTVVGRDCPALGVSLFNRVARSKVAPCSITYAILVDCCCRAGRQDLGFAAMGHVIKMGFTADAMITFSHLLKAICAENKTSYAMDIVLRIMPVFNCIPDVFSYNILFKGLCNEKRSQEALELIQVMVEHGGGCQPDVVSYSTVIDGLLKEGEVNKAYSLFCEMLRQGVSPNVVTCSSIISGMCKLHAMDKAEEVLQQMLDRGILPNVATYTSLIHGYFSLGQCKEVDRIFKEMSRNGVQPNILTYNIQMDYLCKNGRCAEARKIFDSMVSLGQKPTVTTYSILLHGYALERSFHEMHCLIDLMVGNGIAPNHFLYNILISACAKEEMIGEVMHIFKKMRQHGLNPNVVTYGAVVNLLSKIGRMDDAMSQFNQMITEGLAPDIIVFTLLISGFCSCGKWEKVDELFSEMLDRGIYPNTVFFNTIMDCLCKNERVMEAQDLFDLMVHMGVKPDVCTYNTLIGGYLFIGKMDEVRKLLDNMVSIGLKPNVITYSILIDGYSKNGRIDDALVVSREMLAGKVKPCVITFNIMIGALLKCGRKAEAKDLFDGIWANGLVPDVITYSLMIQKLVEEGSLQESDDLFLSMEKNGCVADSHMLNAIVRSLLRKGEVPRAGTYLSKIDERSFTLEASTASLLTALASGGKGQEYKGLLPENYHSFLE

SEQ ID NO: 3137 - protein, 715 aa, Triticum aestivum; identical to SEQ ID NO: 477

SEQ ID NO: 3138 - protein, 715 aa, Triticum aestivum; identical to SEQ ID NO: 477

SEQ ID NO: 3139 - DNA, 2627 bp, Triticum aestivum
ttctgacagtttaacctaccatgcattgattgtggtcgttcttgaagtctaatggagtacaatggttgccaacttgccatagctttactccaaagtttactcaagttatgaagggctgaatatctagcatatgaccatcagtacagcagaaaagtaaggcaaaaggtgccaaggataacttattaggacaaatccaggcctcacaaagctaattaaaaattgcagcttagctgaggccaaatgtgcaactcccttgaagtagtagccatccgtatgtatgaaacacatatactggatcaacaaaatggtgatagtcagaaagtttactactaacttgttggaagaagtactaaaaaaactctagaaaaggttgacagtcagaaagtttactactgtttctccaacgattattacatttcaaacgtactaaaaaaggaaaaggttggaagaagtaacctacaaagagaagttcacccctcgattagcactccagagcatctaggcaaaatctctagaaaaggtttcaatcagtgccctcttccagaaaatagtggtatttttcggggagtaactccttatattcctggcttttccgccctgacgcaagtgcaaccaacaagctagctgtggaagcttcaaaggtgaacctcctctcatcaattttagacagataagtcccagcccttggcacctcccctttctgaagtaagcttctaactatagcatttagcatatgggagtcggcaacacatccattcttctccatagaaaggaatagatcatcagactcttgtagagaaccttcttcaataagtttttgtatcattaagctatatgtaataacatcgggcactaatccgttggcccagataccgtcaaacaaatctttggcttctgccttcctgccacatttaagcaatgcaccaatcataatattaaaagtgataacacaaggcttaaccttcccggccaacatttccctggaaacaaccaatgcatcatctatgcttccattcttagagtaaccatcaatcagtatgctatatgtgataacatttggtttcaagccaattgagaccatattgtcaagtaacttcctcacttcatccatcttaccaatgaacaagtatccacctatcagtgtgttataagtacacacatcaggcttcacacccatgtgtaccatcaggtcgaagagatcttgggcttccataaccctttcatttttgcagaggcagtccataattatgttgaagaacactgtgttgggacagatgccgcgatccaacatctcagaaaatagttcatcaaccttctcccatttgccacaagaacagaaaccactaataaggagggtgaaaactatgatatcaggagctaacccttcagttatcatttgattgaattgggacatagcatcatccattcggccaatcttggaaagtaagtttactaccgctccataggtcgctacattagggttcaatccatgctgccgcatttttttaaatatatgcattacttcaccaatcatttcttctttagcatatgcagatatgagtatgttgtagagaaaatgatttggcgcaataccatttcccaccatcaaatcaatgagacaatgtatctcatgaaaagatcgttccagagcatacccatgaagcaaaatgctgtaggtagtaacagtcggtttttggcccaaactgaccatggaatcaaaaatcttcctagcttctgcgcatcttccattcttgcaaagataatccatctgtatattataagttacaacatttggttgaacaccatttctagacatttctttgaaaatccgatccacctctttgcactgtcctaatgaaaaatatccatgtattagactagtatacgtggcaacatttggcagaattcctctatcaggcatctgttgaagaacctgctcagccttgtccatcgcatgaaccttgcacatgccagagatgattgagttataggtcacagcattcggcgaaattcctctctgtatcatttcacaaaataggatgtaaaccttgcccaccaaaccctctttcaacaagccatcaattacggtgctataggacaccacatcaggttggcagcgacctccatgctcaaccatcacctgaatcagctcgagagcctcttggcttctcttctcgttgcagagacccttgaaaagaatgttgtaagagaagacatccggtatgcagttaaacatgggcattattcggagtacgatgtccattgcatagctggtcttgttctccgcacagatggcctttagtaggtggctgaaagtgatcatagcatctgcagtaaatcccatcttgatgacgtgtcccatggcagcgaaaccaaggtcctggcggccagtgcggcagcagcagtcgaccagaatggcataggtgatactgcagggtgccaccttggcccttgcgacgcggttgaagagggagacgccgagcgcagggcaatcacggccgacaacggtgaggaggcagttgatggcatggatcgaggagcgcccagcaacctggagcaattcgtcaaacaggtggagtgcgtcctcggtgccaatgtctccggcgtggtaccgagccttgatgttc

SEQ ID NO: 3140 - DNA, 3117 bp, Triticum aestivum
ccaccgcgccgagccgccgctgggccttcgcagcaccacgccgccaaacgccgtcgtcgactgagcttcgcgccatggccatggagtggggggccgcgccgaggagaggccccgacgccacctgctctgccggggctttgcccggcagcggcccacggcggcggcgagggggaggggagggatgtggggtggccggcggcggcgagtcagtggttccccccgtgtcgcctcgaggagggacgcgggggttgggagggtcagtgtagctgatcttcagcatctttgcatccagtctagggtgtatgtggtgtggcgtttgtatccggatggttgtatgtcgtcaatgcttcacatataaagcagccgtgagccttttttgttttttaataaaaaaaagagaaacgtttttattcagcaaagccacttcttgagagagccgaggtctcccaggccagtggcggcggcggaaaaacagagtggcggcggtcgtcctcaccggcgggcgtcggggacgcagcgcgcggcgacggagggtcgcattctcttcatcagcgtcagggccgccgcagccagcgccgagcgcggagatctcgtcctcgcccccctcaacgctgcggccgtgtcgaccagctcgccggcggccagatctcctgtacagcgcatttacctactgcagcagctgcaactcgaaggtgagcatcctggcatctcgtccatcttgctctgctttccttccttctaaccccaggttcatgcccaggctgcgccggtggtgagcggcggcggcgccatcctatcccctcgagggattcttccggccaggtggagctatgagccgccgctttgtccccgtcggcagacgcatcttagagcagaacatcaaggctcggtaccacgccggagacattggcaccgaggacgcactccacctgtttgacgaattgctccaggttgctgggcgctcctcgatccatgccatcaactgcctcctcaccgttgtcggccgtgattgccctgcgcttggcgtctccctcttcaatcgcgtcgcaaggtccaaggtggcaccctgcagtatcacctatgccattctggtcgactgctgctgccgcgctggccgccaggaccttggtttcgctgccatgggacacgtcatcaagatgggatttactgcagatgctatgatcactttcagccacctactaaaggccatctgtgcggagaacaagaccagctatgcaatggacatcgtactccgaataatgcccgtgtttaactgcataccggatgtcttctcctacaacattcttttcaagggtctctgcaacgagaagagaagccaagaggctctcgagctgattcaggtgatggttgagcatggaggtggctgccaacctgatgtggtgtcatatagcactgtaattgatggcttgttgaaagagggtgaggtgaacaaggcttacagtctattttgtgaaatgctgcgtcagggggtatcgccgaatgttgtgacctgtagttcaatcatctctggcatgtgcaagcttcatgcgatggacaaagctgaggaggttcttcaacagatgcttgatagaggaattctgccaaatgttgccacgtatactagtctaatacatggatatttttcattaggacagtgcaaagaggttgatcggattttcaaagaaatgtctagaaatggtgttcaaccaaatattttaacttacaatatacagatggattatctttgcaagaatggaagatgcgcagaagctaggaagatttttgattccatggtcagtttgggccaaaaaccgactgttactacctacagcattttgcttcatgggtatgctctggaacgatcttttcatgagatgcattgtctcattgatttgatggtgggaaatggtattgcgccaaatcattttctctacaacatactcatatctgcatgtgctaaagaagaaatgattggtgaagtaatgcatatatttaaaaaaatgcggcagcatggattgaaccctaatgtagtgacctatggagcggtagtaaacttactttccaagattggccgaatggatgatgctatgtcccaattcaatcaaatgataactgaagggttagctcctgatatcatagttttcaccctccttattagtggtttctgttcttgtggcaaatgggagaaggttgatgaactattttctgagatgttggatcgcggcatctatcccaacacagtgttcttcaacacaattatggactgcctttgcaaaaatgaaagggttatggaagcccaagatctcttcgatctgatggtacacatgggtgtgaagcctgatgtgtgtacttataacacactgataggtggatacttgttcattggtaagatggatgaagtgaggaagttacttgacaatatggtctcaattggcttgaaaccaaatgttattacatatagcatactgattgatggttactctaagaatggaaggatagatgatgcattggttgtttccagggaaatgttggccgggaaggttaagccttgtgttatcacttttaatattatgattggtgcattgcttaaatgtggcaggaaggcagaagccaaagatttgtttgacggtatctgggccaacggattagtgcccgacgttattacatatagcttaatgatacaaaaacttgttgaagaaggttctctacaagagtctgatgatctattcctttctatggagaagaatggatgtgttgccgactcccatatgctaaatgctatagttagaagcttacttcggaaaggggaggtgcccagggctgggacttatctgtctaaaattgatgagaggagcttcacccttgaagcttccacagctagcttgttgactgcacttgcttcaggggggaaaggccaagaatataaggggttactccctgaaaactaccactcttttctggaataggacactggttgaaacctgttctacagattttgcctagatgctctggagtgctaatcgagggatgaacttctctttgtaggttatttcttccaaccttttcctttttagtacgtttgaaatgtaataatcgttggagaaactgtagtaaact

SEQ ID NO: 3141 - DNA, 3748 bp, Triticum aestivum
aagtcgtaatggactgattctagttgaggacatcatgcttcccatataatgtaaaagagaaatggaatacagcaactaacttactgctgacaacttcaacgagtggtcgtgcacaagacagtcatgacgatcagtacaattttttttttgtgagtacgcaaagcttctaattaggaggcttgaggtgtacaaagtattggatctggcacaaaagaggaggcttgaggtgtacaaactagggcagaccgtgaagcaaaccacgagggggtgaggcgacggcgatcctaggactggaggaacacagatctacaatggttgctgccaactataacagcatggttaatggagtacaatggttgccaacttgccatagctttactccaaagtttactcaagttatgaagggctgaatatctagcatatgaccatcagtacagcagaaaagtaaggcaaaaggtgccaaggataacttattaggacaaatccaggcctcacaaagctaattaaaaattgcagcttagctgaggccaaatgtgcaactcccttgaagtagtagccatccgtatgtatgaaacacatatactggatcaacaaaatggtgatagtcagaaagtttactactaacttgttggaagaagtactaaaaaaactctagaaaaggttgacagtcagaaagtttactactgtttctccaacgattattacatttcaaacgtactaaaaaaggaaaaggttggaagaagtaacctacaaagagaagttcacccctcgattagcactccagagcatctaggcaaaatctctagaaaaggtttcaatcagtgccctcttccagaaaatagtggtatttttcggggagtaactccttatattcctggcttttccgccctgacgcaagtgcaaccaacaagctagctgtggaagcttcaaaggtgaacctcctctcatcaattttagacagataagtcccagcccttggcacctcccctttctgaagtaagcttctaactatagcatttagcatatgggagtcggcaacacatccattcttctccatagaaaggaatagatcatcagactcttgtagagaaccttcttcaataagtttttgtatcattaagctatatgtaataacatcgggcactaatccgttggcccagataccgtcaaacaaatctttggcttctgccttcctgccacatttaagcaatgcaccaatcataatattaaaagtgataacacaaggcttaaccttcccggccaacatttccctggaaacaaccaatgcatcatctatgcttccattcttagagtaaccatcaatcagtatgctatatgtgataacatttggtttcaagccaattgagaccatattgtcaagtaacttcctcacttcatccatcttaccaatgaacaagtatccacctatcagtgtgttataagtacacacatcaggcttcacacccatgtgtaccatcaggtcgaagagatcttgggcttccataaccctttcatttttgcagaggcagtccataattatgttgaagaacactgtgttgggacagatgccgcgatccaacatctcagaaaatagttcatcaaccttctcccatttgccacaagaacagaaaccactaataaggagggtgaaaactatgatatcaggagctaacccttcagttatcatttgattgaattgggacatagcatcatccattcggccaatcttggaaagtaagtttactaccgctccataggtcgctacattagggttcaatccatgctgccgcatttttttaaatatatgcattacttcaccaatcatttcttctttagcatatgcagatatgagtatgttgtagagaaaatgatttggcgcaataccatttcccaccatcaaatcaatgagacaatgtatctcatgaaaagatcgttccagagcatacccatgaagcaaaatgctgtaggtagtaacagtcggtttttggcccaaactgaccatggaatcaaaaatcttcctagcttctgcgcatcttccattcttgcaaagataatccatctgtatattataagttacaacatttggttgaacaccatttctagacatttctttgaaaatccgatccacctctttgcactgtcctaatgaaaaatatccatgtattagactagtatacgtggcaacatttggcagaattcctctatcaggcatctgttgaagaacctgctcagccttgtccatcgcatgaaccttgcacatgccagagatgattgagttataggtcacagcattcggcgaaattcctctctgtatcatttcacaaaataggatgtaaaccttgcccaccaaaccctctttcaacaagccatcaattacggtgctataggacaccacatcaggttggcagcgacctccatgctcaaccatcacctgaatcagctcgagagcctcttggcttctcttctcgttgcagagacccttgaaaagaatgttgtaagagaagacatccggtatgcagttaaacatgggcattattcggagtacgatgtccattgcatagctggtcttgttctccgcacagatggcctttagtaggtggctgaaagtgatcatagcatctgcagtaaatcccatcttgatgacgtgtcccatggcagcgaaaccaaggtcctggcggccagtgcggcagcagcagtcgaccagaatggcataggtgatactgcagggtgccaccttggcccttgcgacgcggttgaagagggagacgccgagcgcagggcaatcacggccgacaacggtgaggaggcagttgatggcatggatcgaggagcgcccagcaacctggagcaattcgtcaaacaggtggagtgcgtcctcggtgccaatgtctccggcgtggtaccgagccttgatgttctgctctaagatgcgtctgccgacggggacaaagcggcggctcatagctccacctggccggaagaatccctcgaggggataggatggcgccgccgccgctcaccaccggcgcagcctgggcatgaacctggggttagaaggaaggaaagcagagcaagatggaagagatgtcaggatgccaggatgctcaccgtcgagctgcagctgctgcagtaggtaaatgcgatgtacaggagatctgaccgccggcgagctggtcgacacggccgcagcgttgaggggggcgaggacgagatctccgtgctcggcgctggctgcggcggccctgacgccgatgaagagaatgcgaccctccgtcgccgcgcgctgcgtccccgaccgccgccactctgtatttccgccgccgccactggcctgggagacctcggctctctcaagaagtggctttgctgaataaaaacgtttctctttttttttattaaaaaacaaaaaaggctcacggctgctttatatgtgaagcattgacgacatacaaccatccggatacaaaagccacaccacatacaccctagactggatgcaaagatgctgaagatcagctacaccgaccctcccgacccccgcgtccctcctcgaggcgacacgaggggaaccactgactctccgccgccggccaccccacatccctcccctccccctcgccgccgccgtgggccgctgccgggcaaagccccggcagagcaggtggcggcggggcctcttctcggcgcggccccccactccatggccatggcgcaaagctcagtcgacgacggcgtttggcggcgtggt

SEQ ID NO: 3142 - DNA, 3717 bp, Triticum aestivum
ttgaggacatcatgcttcccatataatgtaaaagagaaatggaatacagcaactaacttactgctgacaacttcaacgagtggtcgtgcacaagacagtcatgacgatcagtacaattttttttttgtgagtacgcaaagcttctaattaggaggcttgaggtgtacaaagtattggatctggcacaaaagaggaggcttgaggtgtacaaactagggcagaccgtgaagcaaaccacgagggggtgaggcgacggcgatcctaggactggaggaacacagatctacaatggttgctgccaactataacagcatggttaatggagtacaatggttgccaacttgccatagctttactccaaagtttactcaagttatgaagggctgaatatctagcatatgaccatcagtacagcagaaaagtaaggcaaaaggtgccaaggataacttattaggacaaatccaggcctcacaaagctaattaaaaattgcagcttagctgaggccaaatgtgcaactcccttgaagtagtagccatccgtatgtatgaaacacatatactggatcaacaaaatggtgatagtcagaaagtttactactaacttgttggaagaagtactaaaaaaactctagaaaaggttgacagtcagaaagtttactactgtttctccaacgattattacatttcaaacgtactaaaaaaggaaaaggttggaagaagtaacctacaaagagaagttcacccctcgattagcactccagagcatctaggcaaaatctctagaaaaggtttcaatcagtgccctcttccagaaaatagtggtatttttcggggagtaactccttatattcctggcttttccgccctgacgcaagtgcaaccaacaagctagctgtggaagcttcaaaggtgaacctcctctcatcaattttagacagataagtcccagcccttggcacctcccctttctgaagtaagcttctaactatagcatttagcatatgggagtcggcaacacatccattcttctccatagaaaggaatagatcatcagactcttgtagagaaccttcttcaataagtttttgtatcattaagctatatgtaataacatcgggcactaatccgttggcccagataccgtcaaacaaatctttggcttctgccttcctgccacatttaagcaatgcaccaatcataatattaaaagtgataacacaaggcttaaccttcccggccaacatttccctggaaacaaccaatgcatcatctatgcttccattcttagagtaaccatcaatcagtatgctatatgtgataacatttggtttcaagccaattgagaccatattgtcaagtaacttcctcacttcatccatcttaccaatgaacaagtatccacctatcagtgtgttataagtacacacatcaggcttcacacccatgtgtaccatcaggtcgaagagatcttgggcttccataaccctttcatttttgcagaggcagtccataattatgttgaagaacactgtgttgggacagatgccgcgatccaacatctcagaaaatagttcatcaaccttctcccatttgccacaagaacagaaaccactaataaggagggtgaaaactatgatatcaggagctaacccttcagttatcatttgattgaattgggacatagcatcatccattcggccaatcttggaaagtaagtttactaccgctccataggtcgctacattagggttcaatccatgctgccgcatttttttaaatatatgcattacttcaccaatcatttcttctttagcatatgcagatatgagtatgttgtagagaaaatgatttggcgcaataccatttcccaccatcaaatcaatgagacaatgtatctcatgaaaagatcgttccagagcatacccatgaagcaaaatgctgtaggtagtaacagtcggtttttggcccaaactgaccatggaatcaaaaatcttcctagcttctgcgcatcttccattcttgcaaagataatccatctgtatattataagttacaacatttggttgaacaccatttctagacatttctttgaaaatccgatccacctctttgcactgtcctaatgaaaaatatccatgtattagactagtatacgtggcaacatttggcagaattcctctatcaggcatctgttgaagaacctgctcagccttgtccatcgcatgaaccttgcacatgccagagatgattgagttataggtcacagcattcggcgaaattcctctctgtatcatttcacaaaataggatgtaaaccttgcccaccaaaccctctttcaacaagccatcaattacggtgctataggacaccacatcaggttggcagcgacctccatgctcaaccatcacctgaatcagctcgagagcctcttggcttctcttctcgttgcagagacccttgaaaagaatgttgtaagagaagacatccggtatgcagttaaacatgggcattattcggagtacgatgtccattgcatagctggtcttgttctccgcacagatggcctttagtaggtggctgaaagtgatcatagcatctgcagtaaatcccatcttgatgacgtgtcccatggcagcgaaaccaaggtcctggcggccagtgcggcagcagcagtcgaccagaatggcataggtgatactgcagggtgccaccttggcccttgcgacgcggttgaagagggagacgccgagcgcagggcaatcacggccgacaacggtgaggaggcagttgatggcatggatcgaggagcgcccagcaacctggagcaattcgtcaaacaggtggagtgcgtcctcggtgccaatgtctccggcgtggtaccgagccttgatgttctgctctaagatgcgtctgccgacggggacaaagcggcggctcatagctccacctggccggaagaatccctcgaggggataggatggcgccgccgccgctcaccaccggcgcagcctgggcatgaacctggggttagaaggaaggaaagcagagcaagatggaagagatgtcaggatgccaggatgctcaccgtcgagctgcagctgctgcagtaggtaaatgcgatgtacaggagatctgaccgccggcgagctggtcgacacggccgcagcgttgaggggggcgaggacgagatctccgtgctcggcgctggctgcggcggccctgacgccgatgaagagaatgcgaccctccgtcgccgcgcgctgcgtccccgaccgccgccactctgtatttccgccgccgccactggcctgggagacctcggctctctcaagaagtggctttgctgaataaaaacgtttctctttttttttattaaaaaacaaaaaaggctcacggctgctttatatgtgaagcattgacgacatacaaccatccggatacaaaagccacaccacatacaccctagactggatgcaaagatgctgaagatcagctacaccgaccctcccgacccccgcgtccctcctcgaggcgacacgaggggaaccactgactctccgccgccggccaccccacatccctcccctccccctcgccgccgccgtgggccgctgccgggcaaagccccggcagagcaggtggcggcggggcctcttctcggcgcggccccccactccatggccatggcgcaaagctcagtcgacgacggcgtttggc

SEQ ID NO: 3143 - protein, 790 aa, Triticum aestivum
MPRFSSTTPMSPPRLRLRLRLCARHSSSTSHPSRIWDPHAAFAAAAQRASSGTLTTEDAHHLFDELLRRGNPVQERPLNKFLAALARAPASASCCDGPALAVTLFGRLSRDVGRRVAQPNVFTYGVLMDCCCRACRTDLVLAFFGRLLKTGLEANQVVFNTLLKGLCHTKRADEALDVLLHRMPELGCTPNVVAYNTVIHGFFKEGHVSKACNLFHEMAQQGVKPNVVTYNSVIDALCKARAMDKAEVVLRQMIDDGVGPDNVTYSSLIHGYSSSGHWKEAVRVFKEMTSRRVTADVHTYNMFMTFLCKHGRSKEAAGIFDTMAIKGLKPDNVSYAIRLHGYATEGCLVDMINLFNSMATHCILPNCHIFNILINAYAKSGKLDKAMLIFNEMQKQGVSPNAVTYSTVIHAFCKKGRLDDAVIKFNQMIDTGVRPDASVYRPLIQGFCTHGDLVKAKEYVTEMMKKGMPPPDIMFFSSIMQNLCTEGRVTEARDILDLIVHIGMRPNVIIFNLLIGGYCLVRKMADALKVFDDMVSYGLEPCNFTYGILINGYCKNRRIDDGLILFKEMLHKGLKPTTFNYNVILDGLFLAGQTVAAKEKFDEMVESGVSVCIDTYSIILGGLCRNSCSSEAITLFRKLSAMNVKFDITIVNIIIGALYRVERNQEAKDLFAAMPANGLVPNAVTYTVMMTNLIKEGSVEEADNLFLSMEKSGCTANSCLLNHIIRRLLEKGEIVKAGNYMSKVDAKSYSLEAKTVSLLISLFSRKGKYREHIKLLPTKYQFLEEAATVE

SEQ ID NO: 3144 - protein, 546 aa, Triticum aestivum
MPGFSSAASMSPLRLRLRLHARHSSSASQPSRRQGWDPHAAFAAATECARSGNLTPEDAHHLFDELLRQGNPVLGRPLNNLLAALARAPASSACRDGPALAVALFSRISQGARLRVLHPTACTYGILMDCSCRAHRLNLAFAFFGRLLRTGLKAGVIEVNSLLKGLCHAKRADEAMEVLLHRMPELFIGVQGTAVYRSLIQGFCTHGDLVKAKEYVTEMMKKGMPPPDIMFFSSIMQNLCTEGRVIEARDILDLIVRIGMRPDVFIFNILIGGYCLVGKMEDASKIFDDMVSYGLEPCNFTYGILINGYCKNKRIDDGLILFKEMLRKGLKPTTFNYNVILDGLFLAGQTVAAKEKFDEMVESGVSVCIDTYSIVLGGLCRNSCSSEAITLFRKLSAMNVKFNITIVNTIIGAFYRVERNQEAKDLFAAIPASGLVPNVVTYTIMIKNLIKEGSVEEADNLFLSMEKSGCSANSYLLNHIIRRLLEKGEIVKAGNYMSKVDAKSYSLEAKTVSLLISLFSRKGKYREHIKLLPTKYQFLEEAATVE

SEQ ID NO: 3145 - protein, 608 aa, Triticum aestivum
MPELGCTPNVVAYTTVIHGFFKEGQVGKACNLFHGMAQQGVAPNLVTYNSVIDALCKAKAMDKAEYFLGQMVDDGVVPDNVTYNSLIHGYSSSGHWKEAVRVFKEMTSRRVTADVHTYNMFMTFLCKHGRSKEAAGIFDTMAMKGLKPDNVSYAILLHGYATEGCLVDMINLFNSMERDCILPDCRIFNILINAYAKSGKLDKAMLIFNEMQKQGVSPNAVTYSTVIDAFCKKGQLDDAMIKFNQMIDTGVRQGTAVYGSLIQGFCTHGDLVKAKELLTEMMNKGMLPPDIKFFHSIMQNLCTEGRVIEARDVLGLIAHIGMRPDVCTFNILIGGYCLVGKMEDASKIFDDMMSYGLEPSNITYGILINGYCKNRRIDDGLILFKEMLHKGLKPTTFNYNIILDGLLLAGRTVAAKEKFNEMVESGVSVCTDTYSIVLGGLRRNNCFSEAIMLFQKLRAMNMKFNIRIVNIMIDAFFRVQRKQEAKDLFAAIPANGLVANVVTYSITMTNLIKEGSVEEADDLFLSMEKSGCTADSYMLNLIVRMLLEKGELVKAGNYMSKVDAMSYSLEAETVSLLISLFSGKGKYREHIGLLPAKYRFREEAATVV

SEQ ID NO: 3146 - DNA, 2367 bp, Triticum aestivum
atgccccgcttctcctccaccacgccaatgtcgccaccccgcctccgcctccgactctgcgcccgccactcctcctccacctctcatccctcacgcatctgggatccccacgccgccttcgccgccgcggcacagcgggcgagctctggcacgctcactacggaggacgcacaccacctgtttgacgaattgctgcggcggggcaatcctgtccaggagcgtcccttgaataaatttctggctgccctcgcccgcgcgcccgcgtccgcatcctgctgcgatggccccgccctggcagtcgccctcttcggccgtttgtcccgagacgtcggacgacgggtggcgcagccaaatgtcttcacctatggcgtcctcatggactgctgctgccgcgcttgccgcacagatctggtgctcgccttctttggccgtctcctcaagacgggcctggaggcaaaccaagtcgtcttcaacaccctcctcaagggcctttgccacacaaagcgggcggatgaggctctggacgtgctgcttcacaggatgcctgagctgggctgcactcctaatgtggtggcgtataacaccgttatccatggcttctttaaggaaggccatgtaagcaaggcctgcaatctgttccatgaaatggcgcagcagggcgttaagcctaatgtggtgacatataactcagttatcgatgcgctgtgcaaggccagagccatggacaaggcagaggtggtccttcgtcagatgattgatgatggtgttggacctgataatgtgacgtatagtagcctcatccatggatattcctcttcaggccactggaaggaggcagttagggtattcaaagagatgacaagtcggagggttacagcagatgtgcatacttacaacatgtttatgacctttctttgcaaacatggaagaagcaaagaagctgcaggaatttttgataccatggctatcaagggcctgaaacctgacaacgtttcatatgctattctccttcatgggtatgccgccgaaggatgcttagttgatatgattaatctcttcaattcaatggaaagagattgtattctacctgactgtcgtatcttcaacatactgattaatgcatatgctaaatctgggaagcttgataaggctatgcttatcttcaatgaaatgcagaaacaaggagtgagtccaaatgcagtcacatattcaaccgtaatacatgcattttgcaagaagggtaggttggatgatgctgtgataaagtttaatcagatgattgatacaggagtacgaccggacgcatctgtttatcgtcccctaatccagggtttttgtacacatggcgatttggtgaaagcaaaggaatatgttactgaaatgatgaagaaaggtatgcctcctcctgatattatgttcttcagttcaatcatgcagaacctatgcacagaaggaagggtaacagaagcacgggatatccttgacttgatagtgcacattggtatgaggcctaatgttatcatatttaatttgctgatcggtggatactgcctagtccgcaagatggcagatgcattgaaagtatttgatgatatggtgtcatatggtttagaaccttgtaactttacgtatggtatacttattaatggctattgcaaaaatagaaggattgatgacgggcttattctgttcaaagagatgctgcacaagggacttaaacctacaacttttaattataacgtcatactggatggattatttctggctggacaaactgttgctgcaaaagagaagtttgatgagatggttgaatctggagtaagtgtgtgcattgatacatactctataattcttggtggactttgtagaaatagctgcagtagcgaagcgatcacccttttccggaaattaagcgcaatgaatgtgaaatttgatattacaattgtcaatatcattattggtgccttatacagggtcgagagaaaccaagaggctaaggatttgtttgctgctatgccagccaatggcttggttcctaatgctgttacctacaccgtaatgatgacaaatcttataaaagaaggttcagtggaagaagctgacaatcttttcttatccatggagaagagcggctgtactgccaactcttgcctgttaaatcatatcatcagaaggttactggaaaaaggagagatagtcaaggctggaaattatatgtctaaagttgatgcaaagagctactcacttgaagctaaaactgtttcgctgctgatctctctgttttcaaggaaagggaaatatagagaacacatcaaattgcttcctacaaagtatcagtttctggaagaagcagccacagttgaatag

SEQ ID NO: 3147 - DNA, 1176 bp, Triticum aestivum
atgcctggcttctcctccgccgcgtcaatgtcgccactgcgcctccgcctccgcctgcacgcccgccactcctccgcctcgcaaccctcacgccgccagggatgggatccccacgccgccttcgccgccgccacggagtgtgcgcgctccggcaacctcaccccggaggacgcacataacctgttcgacgaattgctgcggcagggcaatcctgtccttgggcgccccctcaacaaccttctcgccgccctcgcccgcgcgccggcgtccagcgcctgcagagatggccccgcactcgtggtcgccctcttcagccgcatatcccaaggcgcccgcctaagggtgctgcacccaacggcctgcacctacggcatcctcatggactgcagctgccgcgcacaccgcctcgatctggcgtttgccttcttcggccgtctcctcaggacgggactgaaggcaggcgtcatagaagtcaacagtctcctcaaaggactctgccacgcaaagcgggcggatgaggccatggaagtgcttcttcacaggatgcctgagctgtttataggagtacagggcacagctgtttatcgttccctaatccagggattttgtacacacggcgatttggtgaaagcaaaggaatatgttactgaaatgatgaagaaaggtatgcctcctcctgatattatgttcttcagttcaatcatgcagaacctatgcacagaaggaagggtaatagaagcacgagatatccttgacttgatagtgcgcattggtatgaggcctgatgttttcatatttaatatactgatcggtggatactgcctagtcggcaagatggaggatgcctcaaaaatatttgatgatatggtgtcatatggtttagaaccttgtaactttacgtatggtatacttattaatggctattgcaaaaataaaaggattgatgacgggcttattctgttcaaagagatgctgcgcaagggacttaaacctacaacttttaattataacgtcatactggatggattatttctggctggacaaactgttgctgcaaaagagaagtttgatgagatggttgaatctggagtaagtgtgtgcattgatacatactctatagttcttggtggactttgtagaaatagctgcagtagcgaagcgatcaccctgttctga

SEQ ID NO: 3148 - DNA, 1629 bp, Triticum aestivum
atgcctcgcctctcctccaccacgccaatgtcaccaccacgcctccgcctccgactccgcggccgccactcctcctccacctctcatccctcacgcatctgggatccccacgccgccttcgccggcgcgacgcagcgggcgcactctggcaacctcaccccggaggacgcacaccacctgttcgacgaattgctgcggcagggcaatcctgtccaggagcgtcccttgactaactttctggctgccctcgcccgcgcgcccgcgtccgcatcctgcagcgatggccccgccctggccgtagccctcttcggtcgtttgtcccgaggcgccggacgacgcgtggcacagccaaatgtcttcacctatggcgtcctcatggactgctgctgccgcgcgtgccgcccggatctggcgctcgctttcttcggccgtctcttcaggaagggcctggaggcaaaccgagtcatcttctgcaccctcctcaagggactctgccacgcaaagcgcacagatgaggctctggacgtgctgcttcacaggatgcctgagctgggctgcacccccaacgtggtggcatataccacggtcatccacggcttctttaaggaaggccaagtaggcaaggcatgcaatctgttccatggaatggcgcagcagggcgttgcgcctaatttggtgacatataactcggttattgatgcgttgtgcaaggccaaagcaatggacaaggcagagtatttccttggtcagatggttgatgatggtgtcgtacctgataatgtgacatataatagcctcatccatggatattcctcttcaggccactggaaggaggcagttagggtattcaaagagatgacaagtcggagggttacagcagatgtgcatacttacaacatgtttatgacctttctttgcaaacatggaagaagcaaagaagctgcaggaatttttgataccatggctattaagggcctgaaacctgacaacgtttcatatgctattctccttcatgggtatgccaccgaaggatgcttagttgatatgattaatctcttcaattcaatggaaagagattgtattctacctgactgtcgtatcttcaacatactgattaatgcatatgctaaatctgggaagcttgataaggctatgcttatcttcaatgaaatgcagaaacaaggagtgagtccaaatgcagtcacatattcaaccgtaatacatacattttgcaaaaagggtaggttggatgatgctgtgataaagtttaatcagatgattgatacaggagtacgacagggcacagctgtttatggttctctaatccagggtttttgtacacacggcgatttggtgaaagcaaaggaattgcttactgaaatgatgaacaaaggtatgcttcctcctgatatcaagttcttccattcaatcatgcagaacctttgcacagaaggaagggtaatagaagcacgggatgtccttggcttgatagcgcacataggtatgaggcctgatgtttgcacatttaatatactgatcggtggatactgcctagtcggcaagatggaggatgcctcaaaaatatttgatgatatgatgtcatatggcttagaaccttctaattgttag

SEQ ID NO: 3149 - DNA, 2373 bp, Triticum aestivum
atgccccgcttctcctccaccacgccaatgtcgccaccccgcctccgcctccgcctccgactctgcgcccgccactcctcctccacctctcatccctcacgcatctgggatccccacgccgccttcgccgccgcggcacagcgggcgagctctggcacgctcactacggaggacgcacaccacctgtttgacgaattgctgcggcggggcaatcctgtccaggagcgtcccttgaataaatttctggctgccctcgcccgcgcgcccgcgtccgcatcctgctgcgatggccccgccctggcagtcaccctcttcggccgtttgtcccgagacgtcggacgacgggtggcgcagccaaatgtcttcacctatggcgtcctcatggactgctgctgccgcgcttgccgcacagatctggtgctcgccttctttggccgtctcctcaagacgggcctggaggcaaaccaagtcgtcttcaacaccctcctcaagggcctttgccacacaaagcgggcggatgaggctctggacgtgctgcttcacaggatgcctgagctgggctgcactcctaatgtggtggcgtataacaccgttatccatggcttctttaaggaaggccatgtaagcaaggcctgcaatctgttccatgaaatggcgcagcagggcgttaagcctaatgtggtgacatataactcagttattgatgcgctgtgcaaggccagagccatggacaaggcagaggtggtccttcgtcagatgattgatgatggtgttggacctgataatgtgacgtatagtagcctcatccatggatattcctcttcaggccactggaaggaggcagttagggtattcaaagagatgacaagtcggagggttacagcagatgtgcatacttacaacatgtttatgacctttctttgcaaacatggaagaagcaaagaagctgcaggaatttttgataccatggctatcaagggcctgaaacctgacaacgtttcatatgctattcgccttcatgggtatgccaccgaaggatgcctagttgacatgatcaatctcttcaattccatggcaacacactgcattctacctaactgtcatatattcaacatactgattaatgcatatgctaaatctgggaagcttgataaggctatgcttatcttcaatgaaatgcagaaacaaggagtgagtccaaatgcagtcacatattcaaccgtaatacatgcattttgcaagaagggtaggttggatgatgctgtgataaagtttaatcagatgattgatacaggagtacgaccggacgcatctgtttatcgtcccctaatccagggtttttgtacacatggcgatttggtgaaagcaaaggaatatgttactgaaatgatgaagaaaggtatgcctcctcctgatattatgttcttcagttcaatcatgcagaacctatgcacagaaggaagggtaacagaagcacgggatatccttgacttgatagtgcacattggtatgaggcctaatgttatcatatttaatttgctgatcggtggatactgcctagtccgcaagatggcagatgcattgaaagtatttgatgatatggtgtcatatggtttagaaccttgtaactttacgtatggtatacttattaatggctattgcaaaaatagaaggattgatgacgggcttattctgttcaaagagatgctgcacaagggacttaaacctacaacttttaattataacgtcatactggatggattatttctggctggacaaactgttgctgcaaaagagaagtttgatgagatggttgaatctggagtaagtgtgtgcattgatacatactctataattcttggtggactttgtagaaatagctgcagtagcgaagcgatcacccttttccggaaattaagcgcaatgaatgtgaaatttgatattacaattgtcaatatcattattggtgccttatacagggtcgagagaaaccaagaggctaaggatttgtttgctgctatgccagccaatggcttggttcctaatgctgttacctacaccgtaatgatgacaaatcttataaaagaaggttcagtggaagaagctgacaatcttttcttatccatggagaagagcggctgtactgccaactcttgcctgttaaatcatatcatcagaaggttactggaaaaaggagagatagtcaaggctggaaattatatgtctaaagttgatgcaaagagctactcacttgaagctaaaactgtttcgctgctgatctctctgttttcaaggaaagggaaatatagagaacacatcaaattgcttcctacaaagtatcagtttctggaagaagcagccacagttgaatag

SEQ ID NO: 3150 - DNA, 4821 bp, Triticum aestivum
gtgcagcgtgacccggtcgtgcccctctctagagataatgagcattgcatgtctaagttataaaaaattaccacatattttttttgtcacacttgtttgaagtgcagtttatctatctttatacatatatttaaactttactctacgaataatataatctatagtactacaataatatcagtgttttagagaatcatataaatgaacagttagacatggtctaaaggacaattgagtattttgacaacaggactctacagttttatctttttagtgtgcatgtgttctcctttttttttgcaaatagcttcacctatataatacttcatccattttattagtacatccatttagggtttagggttaatggtttttatagactaatttttttagtacatctattttattctattttagcctctaaattaagaaaactaaaactctattttagtttttttatttaataatttagatataaaatagaataaaataaagtgactaaaaattaaacaaataccctttaagaaattaaaaaaactaaggaaacatttttcttgtttcgagtagataatgccagcctgttaaacgccgtcgacgagtctaacggacaccaaccagcgaaccagcagcgtcgcgtcgggccaagcgaagcagacggcacggcatctctgtcgctgcctctggacccctctcgagagttccgctccaccgttggacttgctccgctgtcggcatccagaaattgcgtggcggagcggcagacgtgagccggcacggcaggcggcctcctcctcctctcacggcaccggcagctacgggggattcctttcccaccgctccttcgctttcccttcctcgcccgccgtaataaatagacaccccctccacaccctctttccccaacctcgtgttgttcggagcgcacacacacacaaccagatctcccccaaatccacccgtcggcacctccgcttcaaggtacgccgctcgtcctccccccccccccctctctaccttctctagatcggcgttccggtccatggttagggcccggtagttctacttctgttcatgtttgtgttagatccgtgtttgtgttagatccgtgctgctagcgttcgtacacggatgcgacctgtacgtcagacacgttctgattgctaacttgccagtgtttctctttggggaatcctgggatggctctagccgttccgcagacgggatcgatttcatgattttttttgtttcgttgcatagggtttggtttgcccttttcctttatttcaatatatgccgtgcacttgtttgtcgggtcatcttttcatgcttttttttgtcttggttgtgatgatgtggtctggttgggcggtcgttctagatcggagtagaattaattctgtttcaaactacctggtggatttattaattttggatctgtatgtgtgtgccatacatattcatagttacgaattgaagatgatggatggaaatatcgatctaggataggtatacatgttgatgcgggttttactgatgcatatacagagatgctttttgttcgcttggttgtgatgatgtggtgtggttgggcggtcgttcattcgttctagatcggagtagaatactgtttcaaactacctggtgtatttattaattttggaactgtatgtgtgtgtcatacatcttcatagttacgagtttaagatggatggaaatatcgatctaggataggtatacatgttgatgtgggttttactgatgcatatacatgatggcatatgcagcatctattcatatgctctaaccttgagtacctatctattataataaacaagtatgttttataattattttgatcttgatatacttggatgatggcatatgcagcagctatatgtggatttttttagccctgccttcatacgctatttatttgcttggtactgtttcttttgtcgatgctcaccctgttgtttggtgttacttctgcaggtctccaccatgccccgcttctcctccaccacgccaatgtcgccaccccgcctccgcctccgactctgcgcccgccactcctcctccacctctcatccctcacgcatctgggatccccacgccgccttcgccgccgcggcacagcgggcgagctctggcacgctcactacggaggacgcacaccacctgtttgacgaattgctgcggcggggcaatcctgtccaggagcgtcccttgaataaatttctggctgccctcgcccgcgcgcccgcgtccgcatcctgctgcgatggccccgccctggcagtcgccctcttcggccgtttgtcccgagacgtcggacgacgggtggcgcagccaaatgtcttcacctatggcgtcctcatggactgctgctgccgcgcttgccgcacagatctggtgctcgccttctttggccgtctcctcaagacgggcctggaggcaaaccaagtcgtcttcaacaccctcctcaagggcctttgccacacaaagcgggcggatgaggctctggacgtgctgcttcacaggatgcctgagctgggctgcactcctaatgtggtggcgtataacaccgttatccatggcttctttaaggaaggccatgtaagcaaggcctgcaatctgttccatgaaatggcgcagcagggcgttaagcctaatgtggtgacatataactcagttatcgatgcgctgtgcaaggccagagccatggacaaggcagaggtggtccttcgtcagatgattgatgatggtgttggacctgataatgtgacgtatagtagcctcatccatggatattcctcttcaggccactggaaggaggcagttagggtattcaaagagatgacaagtcggagggttacagcagatgtgcatacttacaacatgtttatgacctttctttgcaaacatggaagaagcaaagaagctgcaggaatttttgataccatggctatcaagggcctgaaacctgacaacgtttcatatgctattctccttcatgggtatgccgccgaaggatgcttagttgatatgattaatctcttcaattcaatggaaagagattgtattctacctgactgtcgtatcttcaacatactgattaatgcatatgctaaatctgggaagcttgataaggctatgcttatcttcaatgaaatgcagaaacaaggagtgagtccaaatgcagtcacatattcaaccgtaatacatgcattttgcaagaagggtaggttggatgatgctgtgataaagtttaatcagatgattgatacaggagtacgaccggacgcatctgtttatcgtcccctaatccagggtttttgtacacatggcgatttggtgaaagcaaaggaatatgttactgaaatgatgaagaaaggtatgcctcctcctgatattatgttcttcagttcaatcatgcagaacctatgcacagaaggaagggtaacagaagcacgggatatccttgacttgatagtgcacattggtatgaggcctaatgttatcatatttaatttgctgatcggtggatactgcctagtccgcaagatggcagatgcattgaaagtatttgatgatatggtgtcatatggtttagaaccttgtaactttacgtatggtatacttattaatggctattgcaaaaatagaaggattgatgacgggcttattctgttcaaagagatgctgcacaagggacttaaacctacaacttttaattataacgtcatactggatggattatttctggctggacaaactgttgctgcaaaagagaagtttgatgagatggttgaatctggagtaagtgtgtgcattgatacatactctataattcttggtggactttgtagaaatagctgcagtagcgaagcgatcacccttttccggaaattaagcgcaatgaatgtgaaatttgatattacaattgtcaatatcattattggtgccttatacagggtcgagagaaaccaagaggctaaggatttgtttgctgctatgccagccaatggcttggttcctaatgctgttacctacaccgtaatgatgacaaatcttataaaagaaggttcagtggaagaagctgacaatcttttcttatccatggagaagagtggctgtactgccaactcttgcctgttaaatcatatcatcagaaggttactggaaaaaggagagatagtcaaggctggaaattatatgtctaaagttgatgcaaagagctactcacttgaagctaaaactgtttcgctgctgatctctctgttttcaaggaaagggaaatatagagaacacatcaaattgcttcctacaaagtatcagtttctggaagaagcagccacagttgaatagaacgcatccatggacgtggattgaattgaaggtgtactactgctgtgctggtccgtggatcgtggctgtcatgcatggtttgctgtgtcttctacgatatgtacttccctttgttccgtatatgtacatcttcctcgtttggttcatgtattttcctttgaataataataaataaatcgggctttccatatcggatgcttttatatctgtgtgtatggagattgtggtatatggtttcatctcaagttgtttacgtcaagaactaaagatatttcctcaaaaaaaaagaactaaagatataatcaatgtcattaacataactcatttccatgaggagaggacgaaggacgaagtcataataagtagattggttgatattttataatcattcaaaactgcaggggttataagatcttcattttgtagaagttttagatcttccgaggggttctc

SEQ ID NO: 3151 - DNA, 4827 bp, Triticum aestivum
gtgcagcgtgacccggtcgtgcccctctctagagataatgagcattgcatgtctaagttataaaaaattaccacatattttttttgtcacacttgtttgaagtgcagtttatctatctttatacatatatttaaactttactctacgaataatataatctatagtactacaataatatcagtgttttagagaatcatataaatgaacagttagacatggtctaaaggacaattgagtattttgacaacaggactctacagttttatctttttagtgtgcatgtgttctcctttttttttgcaaatagcttcacctatataatacttcatccattttattagtacatccatttagggtttagggttaatggtttttatagactaatttttttagtacatctattttattctattttagcctctaaattaagaaaactaaaactctattttagtttttttatttaataatttagatataaaatagaataaaataaagtgactaaaaattaaacaaataccctttaagaaattaaaaaaactaaggaaacatttttcttgtttcgagtagataatgccagcctgttaaacgccgtcgacgagtctaacggacaccaaccagcgaaccagcagcgtcgcgtcgggccaagcgaagcagacggcacggcatctctgtcgctgcctctggacccctctcgagagttccgctccaccgttggacttgctccgctgtcggcatccagaaattgcgtggcggagcggcagacgtgagccggcacggcaggcggcctcctcctcctctcacggcaccggcagctacgggggattcctttcccaccgctccttcgctttcccttcctcgcccgccgtaataaatagacaccccctccacaccctctttccccaacctcgtgttgttcggagcgcacacacacacaaccagatctcccccaaatccacccgtcggcacctccgcttcaaggtacgccgctcgtcctccccccccccccctctctaccttctctagatcggcgttccggtccatggttagggcccggtagttctacttctgttcatgtttgtgttagatccgtgtttgtgttagatccgtgctgctagcgttcgtacacggatgcgacctgtacgtcagacacgttctgattgctaacttgccagtgtttctctttggggaatcctgggatggctctagccgttccgcagacgggatcgatttcatgattttttttgtttcgttgcatagggtttggtttgcccttttcctttatttcaatatatgccgtgcacttgtttgtcgggtcatcttttcatgcttttttttgtcttggttgtgatgatgtggtctggttgggcggtcgttctagatcggagtagaattaattctgtttcaaactacctggtggatttattaattttggatctgtatgtgtgtgccatacatattcatagttacgaattgaagatgatggatggaaatatcgatctaggataggtatacatgttgatgcgggttttactgatgcatatacagagatgctttttgttcgcttggttgtgatgatgtggtgtggttgggcggtcgttcattcgttctagatcggagtagaatactgtttcaaactacctggtgtatttattaattttggaactgtatgtgtgtgtcatacatcttcatagttacgagtttaagatggatggaaatatcgatctaggataggtatacatgttgatgtgggttttactgatgcatatacatgatggcatatgcagcatctattcatatgctctaaccttgagtacctatctattataataaacaagtatgttttataattattttgatcttgatatacttggatgatggcatatgcagcagctatatgtggatttttttagccctgccttcatacgctatttatttgcttggtactgtttcttttgtcgatgctcaccctgttgtttggtgttacttctgcaggtctccaccatgccccgcttctcctccaccacgccaatgtcgccaccccgcctccgcctccgcctccgactctgcgcccgccactcctcctccacctctcatccctcacgcatctgggatccccacgccgccttcgccgccgcggcacagcgggcgagctctggcacgctcactacggaggacgcacaccacctgtttgacgaattgctgcggcggggcaatcctgtccaggagcgtcccttgaataaatttctggctgccctcgcccgcgcgcccgcgtccgcatcctgctgcgatggccccgccctggcagtcaccctcttcggccgtttgtcccgagacgtcggacgacgggtggcgcagccaaatgtcttcacctatggcgtcctcatggactgctgctgccgcgcttgccgcacagatctggtgctcgccttctttggccgtctcctcaagacgggcctggaggcaaaccaagtcgtcttcaacaccctcctcaagggcctttgccacacaaagcgggcggatgaggctctggacgtgctgcttcacaggatgcctgagctgggctgcactcctaatgtggtggcgtataacaccgttatccatggcttctttaaggaaggccatgtaagcaaggcctgcaatctgttccatgaaatggcgcagcagggcgttaagcctaatgtggtgacatataactcagttattgatgcgctgtgcaaggccagagccatggacaaggcagaggtggtccttcgtcagatgattgatgatggtgttggacctgataatgtgacgtatagtagcctcatccatggatattcctcttcaggccactggaaggaggcagttagggtattcaaagagatgacaagtcggagggttacagcagatgtgcatacttacaacatgtttatgacctttctttgcaaacatggaagaagcaaagaagctgcaggaatttttgataccatggctatcaagggcctgaaacctgacaacgtttcatatgctattcgccttcatgggtatgccaccgaaggatgcctagttgacatgatcaatctcttcaattccatggcaacacactgcattctacctaactgtcatatattcaacatactgattaatgcatatgctaaatctgggaagcttgataaggctatgcttatcttcaatgaaatgcagaaacaaggagtgagtccaaatgcagtcacatattcaaccgtaatacatgcattttgcaagaagggtaggttggatgatgctgtgataaagtttaatcagatgattgatacaggagtacgaccggacgcatctgtttatcgtcccctaatccagggtttttgtacacatggcgatttggtgaaagcaaaggaatatgttactgaaatgatgaagaaaggtatgcctcctcctgatattatgttcttcagttcaatcatgcagaacctatgcacagaaggaagggtaacagaagcacgggatatccttgacttgatagtgcacattggtatgaggcctaatgttatcatatttaatttgctgatcggtggatactgcctagtccgcaagatggcagatgcattgaaagtatttgatgatatggtgtcatatggtttagaaccttgtaactttacgtatggtatacttattaatggctattgcaaaaatagaaggattgatgacgggcttattctgttcaaagagatgctgcacaagggacttaaacctacaacttttaattataacgtcatactggatggattatttctggctggacaaactgttgctgcaaaagagaagtttgatgagatggttgaatctggagtaagtgtgtgcattgatacatactctataattcttggtggactttgtagaaatagctgcagtagcgaagcgatcacccttttccggaaattaagcgcaatgaatgtgaaatttgatattacaattgtcaatatcattattggtgccttatacagggtcgagagaaaccaagaggctaaggatttgtttgctgctatgccagccaatggcttggttcctaatgctgttacctacaccgtaatgatgacaaatcttataaaagaaggttcagtggaagaagctgacaatcttttcttatccatggagaagagtggctgtactgccaactcttgcctgttaaatcatatcatcagaaggttactggaaaaaggagagatagtcaaggctggaaattatatgtctaaagttgatgcaaagagctactcacttgaagctaaaactgtttcgctgctgatctctctgttttcaaggaaagggaaatatagagaacacatcaaattgcttcctacaaagtatcagtttctggaagaagcagccacagttgaatagaacgcatccatggacgtggattgaattgaaggtgtactactgctgtgctggtccgtggatcgtggctgtcatgcatggtttgctgtgtcttctacgatatgtacttccctttgttccgtatatgtacatcttcctcgtttggttcatgtattttcctttgaataataataaataaatcgggctttccatatcggatgcttttatatctgtgtgtatggagattgtggtatatggtttcatctcaagttgtttacgtcaagaactaaagatatttcctcaaaaaaaaagaactaaagatataatcaatgtcattaacataactcatttccatgaggagaggacgaaggacgaagtcataataagtagattggttgatattttataatcattcaaaactgcaggggttataagatcttcattttgtagaagttttagatcttccgaggggttctc

SEQ ID NO: 3152 - DNA, 3630 bp, Triticum aestivum
gtgcagcgtgacccggtcgtgcccctctctagagataatgagcattgcatgtctaagttataaaaaattaccacatattttttttgtcacacttgtttgaagtgcagtttatctatctttatacatatatttaaactttactctacgaataatataatctatagtactacaataatatcagtgttttagagaatcatataaatgaacagttagacatggtctaaaggacaattgagtattttgacaacaggactctacagttttatctttttagtgtgcatgtgttctcctttttttttgcaaatagcttcacctatataatacttcatccattttattagtacatccatttagggtttagggttaatggtttttatagactaatttttttagtacatctattttattctattttagcctctaaattaagaaaactaaaactctattttagtttttttatttaataatttagatataaaatagaataaaataaagtgactaaaaattaaacaaataccctttaagaaattaaaaaaactaaggaaacatttttcttgtttcgagtagataatgccagcctgttaaacgccgtcgacgagtctaacggacaccaaccagcgaaccagcagcgtcgcgtcgggccaagcgaagcagacggcacggcatctctgtcgctgcctctggacccctctcgagagttccgctccaccgttggacttgctccgctgtcggcatccagaaattgcgtggcggagcggcagacgtgagccggcacggcaggcggcctcctcctcctctcacggcaccggcagctacgggggattcctttcccaccgctccttcgctttcccttcctcgcccgccgtaataaatagacaccccctccacaccctctttccccaacctcgtgttgttcggagcgcacacacacacaaccagatctcccccaaatccacccgtcggcacctccgcttcaaggtacgccgctcgtcctccccccccccccctctctaccttctctagatcggcgttccggtccatggttagggcccggtagttctacttctgttcatgtttgtgttagatccgtgtttgtgttagatccgtgctgctagcgttcgtacacggatgcgacctgtacgtcagacacgttctgattgctaacttgccagtgtttctctttggggaatcctgggatggctctagccgttccgcagacgggatcgatttcatgattttttttgtttcgttgcatagggtttggtttgcccttttcctttatttcaatatatgccgtgcacttgtttgtcgggtcatcttttcatgcttttttttgtcttggttgtgatgatgtggtctggttgggcggtcgttctagatcggagtagaattaattctgtttcaaactacctggtggatttattaattttggatctgtatgtgtgtgccatacatattcatagttacgaattgaagatgatggatggaaatatcgatctaggataggtatacatgttgatgcgggttttactgatgcatatacagagatgctttttgttcgcttggttgtgatgatgtggtgtggttgggcggtcgttcattcgttctagatcggagtagaatactgtttcaaactacctggtgtatttattaattttggaactgtatgtgtgtgtcatacatcttcatagttacgagtttaagatggatggaaatatcgatctaggataggtatacatgttgatgtgggttttactgatgcatatacatgatggcatatgcagcatctattcatatgctctaaccttgagtacctatctattataataaacaagtatgttttataattattttgatcttgatatacttggatgatggcatatgcagcagctatatgtggatttttttagccctgccttcatacgctatttatttgcttggtactgtttcttttgtcgatgctcaccctgttgtttggtgttacttctgcaggtctccaccatgcctggcttctcctccgccgcgtcaatgtcgccactgcgcctccgcctccgcctgcacgcccgccactcctccgcctcgcaaccctcacgccgccagggatgggatccccacgccgccttcgccgccgccacggagtgtgcgcgctccggcaacctcaccccggaggacgcacataacctgttcgacgaattgctgcggcagggcaatcctgtccttgggcgccccctcaacaaccttctcgccgccctcgcccgcgcgccggcgtccagcgcctgcagagatggccccgcactcgtggtcgccctcttcagccgcatatcccaaggcgcccgcctaagggtgctgcacccaacggcctgcacctacggcatcctcatggactgcagctgccgcgcacaccgcctcgatctggcgtttgccttcttcggccgtctcctcaggacgggactgaaggcaggcgtcatagaagtcaacagtctcctcaaaggactctgccacgcaaagcgggcggatgaggccatggaagtgcttcttcacaggatgcctgagctgtttataggagtacagggcacagctgtttatcgttccctaatccagggattttgtacacacggcgatttggtgaaagcaaaggaatatgttactgaaatgatgaagaaaggtatgcctcctcctgatattatgttcttcagttcaatcatgcagaacctatgcacagaaggaagggtaatagaagcacgagatatccttgacttgatagtgcgcattggtatgaggcctgatgttttcatatttaatatactgatcggtggatactgcctagtcggcaagatggaggatgcctcaaaaatatttgatgatatggtgtcatatggtttagaaccttgtaactttacgtatggtatacttattaatggctattgcaaaaataaaaggattgatgacgggcttattctgttcaaagagatgctgcgcaagggacttaaacctacaacttttaattataacgtcatactggatggattatttctggctggacaaactgttgctgcaaaagagaagtttgatgagatggttgaatctggagtaagtgtgtgcattgatacatactctatagttcttggtggactttgtagaaatagctgcagtagcgaagcgatcaccctgttctgaaacgcatccatggacgtggattgaattgaaggtgtactactgctgtgctggtccgtggatcgtggctgtcatgcatggtttgctgtgtcttctacgatatgtacttccctttgttccgtatatgtacatcttcctcgtttggttcatgtattttcctttgaataataataaataaatcgggctttccatatcggatgcttttatatctgtgtgtatggagattgtggtatatggtttcatctcaagttgtttacgtcaagaactaaagatatttcctcaaaaaaaaagaactaaagatataatcaatgtcattaacataactcatttccatgaggagaggacgaaggacgaagtcataataagtagattggttgatattttataatcattcaaaactgcaggggttataagatcttcattttgtagaagttttagatcttccgaggggttctc

SEQ ID NO: 3153 - DNA, 4083 bp, Triticum aestivum
gtgcagcgtgacccggtcgtgcccctctctagagataatgagcattgcatgtctaagttataaaaaattaccacatattttttttgtcacacttgtttgaagtgcagtttatctatctttatacatatatttaaactttactctacgaataatataatctatagtactacaataatatcagtgttttagagaatcatataaatgaacagttagacatggtctaaaggacaattgagtattttgacaacaggactctacagttttatctttttagtgtgcatgtgttctcctttttttttgcaaatagcttcacctatataatacttcatccattttattagtacatccatttagggtttagggttaatggtttttatagactaatttttttagtacatctattttattctattttagcctctaaattaagaaaactaaaactctattttagtttttttatttaataatttagatataaaatagaataaaataaagtgactaaaaattaaacaaataccctttaagaaattaaaaaaactaaggaaacatttttcttgtttcgagtagataatgccagcctgttaaacgccgtcgacgagtctaacggacaccaaccagcgaaccagcagcgtcgcgtcgggccaagcgaagcagacggcacggcatctctgtcgctgcctctggacccctctcgagagttccgctccaccgttggacttgctccgctgtcggcatccagaaattgcgtggcggagcggcagacgtgagccggcacggcaggcggcctcctcctcctctcacggcaccggcagctacgggggattcctttcccaccgctccttcgctttcccttcctcgcccgccgtaataaatagacaccccctccacaccctctttccccaacctcgtgttgttcggagcgcacacacacacaaccagatctcccccaaatccacccgtcggcacctccgcttcaaggtacgccgctcgtcctccccccccccccctctctaccttctctagatcggcgttccggtccatggttagggcccggtagttctacttctgttcatgtttgtgttagatccgtgtttgtgttagatccgtgctgctagcgttcgtacacggatgcgacctgtacgtcagacacgttctgattgctaacttgccagtgtttctctttggggaatcctgggatggctctagccgttccgcagacgggatcgatttcatgattttttttgtttcgttgcatagggtttggtttgcccttttcctttatttcaatatatgccgtgcacttgtttgtcgggtcatcttttcatgcttttttttgtcttggttgtgatgatgtggtctggttgggcggtcgttctagatcggagtagaattaattctgtttcaaactacctggtggatttattaattttggatctgtatgtgtgtgccatacatattcatagttacgaattgaagatgatggatggaaatatcgatctaggataggtatacatgttgatgcgggttttactgatgcatatacagagatgctttttgttcgcttggttgtgatgatgtggtgtggttgggcggtcgttcattcgttctagatcggagtagaatactgtttcaaactacctggtgtatttattaattttggaactgtatgtgtgtgtcatacatcttcatagttacgagtttaagatggatggaaatatcgatctaggataggtatacatgttgatgtgggttttactgatgcatatacatgatggcatatgcagcatctattcatatgctctaaccttgagtacctatctattataataaacaagtatgttttataattattttgatcttgatatacttggatgatggcatatgcagcagctatatgtggatttttttagccctgccttcatacgctatttatttgcttggtactgtttcttttgtcgatgctcaccctgttgtttggtgttacttctgcaggtctccaccatgcctcgcctctcctccaccacgccaatgtcaccaccacgcctccgcctccgactccgcggccgccactcctcctccacctctcatccctcacgcatctgggatccccacgccgccttcgccggcgcgacgcagcgggcgcactctggcaacctcaccccggaggacgcacaccacctgttcgacgaattgctgcggcagggcaatcctgtccaggagcgtcccttgactaactttctggctgccctcgcccgcgcgcccgcgtccgcatcctgcagcgatggccccgccctggccgtagccctcttcggtcgtttgtcccgaggcgccggacgacgcgtggcacagccaaatgtcttcacctatggcgtcctcatggactgctgctgccgcgcgtgccgcccggatctggcgctcgctttcttcggccgtctcttcaggaagggcctggaggcaaaccgagtcatcttctgcaccctcctcaagggactctgccacgcaaagcgcacagatgaggctctggacgtgctgcttcacaggatgcctgagctgggctgcacccccaacgtggtggcatataccacggtcatccacggcttctttaaggaaggccaagtaggcaaggcatgcaatctgttccatggaatggcgcagcagggcgttgcgcctaatttggtgacatataactcggttattgatgcgttgtgcaaggccaaagcaatggacaaggcagagtatttccttggtcagatggttgatgatggtgtcgtacctgataatgtgacatataatagcctcatccatggatattcctcttcaggccactggaaggaggcagttagggtattcaaagagatgacaagtcggagggttacagcagatgtgcatacttacaacatgtttatgacctttctttgcaaacatggaagaagcaaagaagctgcaggaatttttgataccatggctattaagggcctgaaacctgacaacgtttcatatgctattctccttcatgggtatgccaccgaaggatgcttagttgatatgattaatctcttcaattcaatggaaagagattgtattctacctgactgtcgtatcttcaacatactgattaatgcatatgctaaatctgggaagcttgataaggctatgcttatcttcaatgaaatgcagaaacaaggagtgagtccaaatgcagtcacatattcaaccgtaatacatacattttgcaaaaagggtaggttggatgatgctgtgataaagtttaatcagatgattgatacaggagtacgacagggcacagctgtttatggttctctaatccagggtttttgtacacacggcgatttggtgaaagcaaaggaattgcttactgaaatgatgaacaaaggtatgcttcctcctgatatcaagttcttccattcaatcatgcagaacctttgcacagaaggaagggtaatagaagcacgggatgtccttggcttgatagcgcacataggtatgaggcctgatgtttgcacatttaatatactgatcggtggatactgcctagtcggcaagatggaggatgcctcaaaaatatttgatgatatgatgtcatatggcttagaaccttctaattgttagaacgcatccatggacgtggattgaattgaaggtgtactactgctgtgctggtccgtggatcgtggctgtcatgcatggtttgctgtgtcttctacgatatgtacttccctttgttccgtatatgtacatcttcctcgtttggttcatgtattttcctttgaataataataaataaatcgggctttccatatcggatgcttttatatctgtgtgtatggagattgtggtatatggtttcatctcaagttgtttacgtcaagaactaaagatatttcctcaaaaaaaaagaactaaagatataatcaatgtcattaacataactcatttccatgaggagaggacgaaggacgaagtcataataagtagattggttgatattttataatcattcaaaactgcaggggttataagatcttcattttgtagaagttttagatcttccgaggggttctc

SEQ ID NO: 3154 - DNA, 2000 bp, Triticum aestivum
cgaagatggtgatgcgcggagctgggtcgcggcttgtccttctgatatcggcggttcggttcccctttgggtgcgtctgtgcttgtttctcactgtgacagagaagttgaagctacatgcggcgggggccctgcggcaatgatgactccatgagggtggcttcggcggacgatgctctccgcaggttgcactggactagcttggtgtgaggcttgcaactttctcctgtgatgctcatcaacaaaatcggagatgtcggtcctcgacgcctgcggccgatcgtttggcttggctgtcgaggtcctcgggtgccgtttgttcggaggggtcttgatgggtcgtcagcgaggaaatcggagttgcctgctcgtggagaggcgatgacgatgacattgcttgcagcctcgacggtgtcctctcgtcagcagtatgtgtgtgatcttgtcagtgccaggtcggccggagtgctctattcgatgggcgtgttttaattaaccgggcaactctcttcttcttaatcaatgaaaatggcaagtcttttacctcgtttcaaaaagagttaaatgcactggaggtcctaaaggtttcgtcggggtgtcactttagtcctatttcttccaaaatgcacctttaggtcctaattctttattaattggttcacccgaggtccttttccacgagcgctagctgaccagcacacgtgccgcattgacccacgccacatcgatagagggtctaaccgccaggcgagaagcttcgcaaagagaccccccccctcttagtggcaccctctctcctctttcacggtactttggcgacattggaggcgagcgacagaggcaaccggaggtgatctggaggtaatttgtgtgggtgcccgtgaagatgccccttctacgacggccagtgagcaatcctcctccatgttaccgtaagaaccctaatcttgtcgacgatcttctcctgtagctcttctaatatgtcataactttgccataatcaatagttgtagtccttgatttactttgatttgcataacggtgctacggacatggcaaaaaggacacaccaccagcggcaacatacccgccgaagttggagcttgcttcgccgcaccggcggcggtgctgaggatgttgccatgctcctcatcttagttgtttccttgccgaggagcttgaagttccggccatggataggtttagggaacgcgcgcgccgagagagagagcagatttggggaagaaataaagccagggactggggaatgagaagataatgtttataaggggttttctgtaaaaagaaagagcaacctacgcggcccttctgtcgatttggcatgggtcaacgcaccacacgagcaggtcaacgagcgctcgtgagaaaaaggacctagggtaaaccacttactaaagaattaggacctaaaggtgcattttggacgaaataagactaaagtgacaccctgacgaattttttaggaccttgagtgcatttaactctttcaaaaaataaagatgctaaaaaaactaaatgcttaaaaatacatttttctatgggaatacttaaaaatactagtataatttgatggcttcctagtatatttctagcgcttacaactaaatttatattcttggtctaaataaaattataatctgataaattatgtgatatgtatatagccatatgagaccataatttaattttacctgcaaaaagtaagtaatagtaatagtagtactacatactccctccgtccgaaaatacttgtcgaagaatttgatgaaaatggatgcatctagaacaagaatacatctagatacatcaatctccccgacaagtatttccgaacggagggagtactagataataagataactatccaaaaaaaaaaagataactgaaggttgccacctagcacattcacattggtacaacttggaaaagcacagccccgtcgtcctgctcccagttgagttcgcgacctacacaccggcc

SEQ ID NO: 3155 - DNA, 2000 bp, Triticum aestivum
tttcggcggacgatgctctccgcaggttgcactggactagcttggtgtgaggcttgcaactttctcctgtgatgctcatcaacaaaatcggagatgtcggtcctcgacgcctgcggccgatcatttggcttggctgtcgaggtcctcgggtgccgtttgttcggaggggtcttgatgggtcgtcagcgaggaaatcggagttgcctgctcgtggagaggcgatgacgatgacattgcagcctcgacggtgtcctctcgtcagcagtatgtgtgtgatcttgtcagtgccaggtcggctggagtgccctattcgatgggcgtgttttaattaaccgggcaactctcttcttcttaatcagtgaaaatggcaagtcttttacctcgtttcaaaaagagttaaatgcactggaggtcctaaaggtttcgtcggggtgtcactttagtcctatttcttccaaaatgcacctttaggtcctaattctttattaattggttcacccgaggtccttttccacgagcgctcgctgaccagcacacgtgccgcattgacccatgccacatcgatagagggtctaaccgccaggcgagaagcttcgcaaagagacccccccccctcttagtggcaccctctctcctctttcacggtactttggcgacattggaggcgagcgacagaggcaaccggaggtgatctggaggtaatttgtgtgggtgcccgtgaagatgccccttctatgacggccagtgagcaatcctcctccatgttaccgtaagaaccctaatcttgtcgatgatcttctcctgtagctcttctaatatgtcataactttgtcataatcaatagttgtagtccttgatttactttgatttgcataacggtgatacggacacggcaaaaaggacacaccaccagcggcaacatacccgccgaagttggagcttgcttcgccgcgccggcggcggtgctgaggatgttgccatgctcctcatcttagttgtttccttgccgaggagcttgaagttccggccatggataggtttaggggacgcgcgcgccgagagagagagcagatttggggaagaaataaagccagggactggggaatgagaagataatgtttataaggggttttctgtaaaaagaaagagcaacctacgcagcccttctgtcgatttggcatgggtcaacgcaccacacgagcaggtcaacgagcgctcgtgagaaaaaggacctagggtaaaccacttactaaagaattaggacctaaaggtgcattttggacgaaataagactaaagtgacaccctgacgaattttttaggaccttgagtgcatttaactctttcaaaaaataaagatgctaaaaaaactaaatgcttaaaaatacatttttctatgggaatacttaaaaatactagtataatttgatggcttcctagtatatttctagggcttacaactaaatttatattcttggtctaaataaaattataatctgataaattatgtgatatgaatatagccatatgagaccataatttaattttacctgcaaaaagtaagtaatagtagtagtagtactacatactccctccgtccggaaatacttgtcgaagaatttgatgaaaatggatgcatctagaacaagaatacatctagatacatcaatctccctgacaagtatttccgagcggagggagtactagataatactccctccgttcctaaataattgtctttctagctatctcaaataaactacaacatacggatgtatgtagacatgttttagagtgtagattcactcattttgttccgtatgtagtcatttgttgaaatctctagagagacaattatttaggaacggagggagtaagataactaccctaaaaaaaaagataactgaaggttgccacctagcacattcacattggtacaacttggaaaagcacagccccgtcgtcctgctcccagttgagttcgcgacctacacaccggcc

SEQ ID NO: 3156 - DNA, 4817 bp, Triticum aestivum
cgaagatggtgatgcgcggagctgggtcgcggcttgtccttctgatatcggcggttcggttcccctttgggtgcgtctgtgcttgtttctcactgtgacagagaagttgaagctacatgcggcgggggccctgcggcaatgatgactccatgagggtggcttcggcggacgatgctctccgcaggttgcactggactagcttggtgtgaggcttgcaactttctcctgtgatgctcatcaacaaaatcggagatgtcggtcctcgacgcctgcggccgatcgtttggcttggctgtcgaggtcctcgggtgccgtttgttcggaggggtcttgatgggtcgtcagcgaggaaatcggagttgcctgctcgtggagaggcgatgacgatgacattgcttgcagcctcgacggtgtcctctcgtcagcagtatgtgtgtgatcttgtcagtgccaggtcggccggagtgctctattcgatgggcgtgttttaattaaccgggcaactctcttcttcttaatcaatgaaaatggcaagtcttttacctcgtttcaaaaagagttaaatgcactggaggtcctaaaggtttcgtcggggtgtcactttagtcctatttcttccaaaatgcacctttaggtcctaattctttattaattggttcacccgaggtccttttccacgagcgctagctgaccagcacacgtgccgcattgacccacgccacatcgatagagggtctaaccgccaggcgagaagcttcgcaaagagaccccccccctcttagtggcaccctctctcctctttcacggtactttggcgacattggaggcgagcgacagaggcaaccggaggtgatctggaggtaatttgtgtgggtgcccgtgaagatgccccttctacgacggccagtgagcaatcctcctccatgttaccgtaagaaccctaatcttgtcgacgatcttctcctgtagctcttctaatatgtcataactttgccataatcaatagttgtagtccttgatttactttgatttgcataacggtgctacggacatggcaaaaaggacacaccaccagcggcaacatacccgccgaagttggagcttgcttcgccgcaccggcggcggtgctgaggatgttgccatgctcctcatcttagttgtttccttgccgaggagcttgaagttccggccatggataggtttagggaacgcgcgcgccgagagagagagcagatttggggaagaaataaagccagggactggggaatgagaagataatgtttataaggggttttctgtaaaaagaaagagcaacctacgcggcccttctgtcgatttggcatgggtcaacgcaccacacgagcaggtcaacgagcgctcgtgagaaaaaggacctagggtaaaccacttactaaagaattaggacctaaaggtgcattttggacgaaataagactaaagtgacaccctgacgaattttttaggaccttgagtgcatttaactctttcaaaaaataaagatgctaaaaaaactaaatgcttaaaaatacatttttctatgggaatacttaaaaatactagtataatttgatggcttcctagtatatttctagcgcttacaactaaatttatattcttggtctaaataaaattataatctgataaattatgtgatatgtatatagccatatgagaccataatttaattttacctgcaaaaagtaagtaatagtaatagtagtactacatactccctccgtccgaaaatacttgtcgaagaatttgatgaaaatggatgcatctagaacaagaatacatctagatacatcaatctccccgacaagtatttccgaacggagggagtactagataataagataactatccaaaaaaaaaaagataactgaaggttgccacctagcacattcacattggtacaacttggaaaagcacagccccgtcgtcctgctcccagttgagttcgcgacctacacaccggccatgccccgcttctcctccaccacgccaatgtcgccaccccgcctccgcctccgactctgcgcccgccactcctcctccacctctcatccctcacgcatctgggatccccacgccgccttcgccgccgcggcacagcgggcgagctctggcacgctcactacggaggacgcacaccacctgtttgacgaattgctgcggcggggcaatcctgtccaggagcgtcccttgaataaatttctggctgccctcgcccgcgcgcccgcgtccgcatcctgctgcgatggccccgccctggcagtcgccctcttcggccgtttgtcccgagacgtcggacgacgggtggcgcagccaaatgtcttcacctatggcgtcctcatggactgctgctgccgcgcttgccgcacagatctggtgctcgccttctttggccgtctcctcaagacgggcctggaggcaaaccaagtcgtcttcaacaccctcctcaagggcctttgccacacaaagcgggcggatgaggctctggacgtgctgcttcacaggatgcctgagctgggctgcactcctaatgtggtggcgtataacaccgttatccatggcttctttaaggaaggccatgtaagcaaggcctgcaatctgttccatgaaatggcgcagcagggcgttaagcctaatgtggtgacatataactcagttatcgatgcgctgtgcaaggccagagccatggacaaggcagaggtggtccttcgtcagatgattgatgatggtgttggacctgataatgtgacgtatagtagcctcatccatggatattcctcttcaggccactggaaggaggcagttagggtattcaaagagatgacaagtcggagggttacagcagatgtgcatacttacaacatgtttatgacctttctttgcaaacatggaagaagcaaagaagctgcaggaatttttgataccatggctatcaagggcctgaaacctgacaacgtttcatatgctattctccttcatgggtatgccgccgaaggatgcttagttgatatgattaatctcttcaattcaatggaaagagattgtattctacctgactgtcgtatcttcaacatactgattaatgcatatgctaaatctgggaagcttgataaggctatgcttatcttcaatgaaatgcagaaacaaggagtgagtccaaatgcagtcacatattcaaccgtaatacatgcattttgcaagaagggtaggttggatgatgctgtgataaagtttaatcagatgattgatacaggagtacgaccggacgcatctgtttatcgtcccctaatccagggtttttgtacacatggcgatttggtgaaagcaaaggaatatgttactgaaatgatgaagaaaggtatgcctcctcctgatattatgttcttcagttcaatcatgcagaacctatgcacagaaggaagggtaacagaagcacgggatatccttgacttgatagtgcacattggtatgaggcctaatgttatcatatttaatttgctgatcggtggatactgcctagtccgcaagatggcagatgcattgaaagtatttgatgatatggtgtcatatggtttagaaccttgtaactttacgtatggtatacttattaatggctattgcaaaaatagaaggattgatgacgggcttattctgttcaaagagatgctgcacaagggacttaaacctacaacttttaattataacgtcatactggatggattatttctggctggacaaactgttgctgcaaaagagaagtttgatgagatggttgaatctggagtaagtgtgtgcattgatacatactctataattcttggtggactttgtagaaatagctgcagtagcgaagcgatcacccttttccggaaattaagcgcaatgaatgtgaaatttgatattacaattgtcaatatcattattggtgccttatacagggtcgagagaaaccaagaggctaaggatttgtttgctgctatgccagccaatggcttggttcctaatgctgttacctacaccgtaatgatgacaaatcttataaaagaaggttcagtggaagaagctgacaatcttttcttatccatggagaagagcggctgtactgccaactcttgcctgttaaatcatatcatcagaaggttactggaaaaaggagagatagtcaaggctggaaattatatgtctaaagttgatgcaaagagctactcacttgaagctaaaactgtttcgctgctgatctctctgttttcaaggaaagggaaatatagagaacacatcaaattgcttcctacaaagtatcagtttctggaagaagcagccacagttgaataggcatccatggacgtggattgaattgaaggtgtactactgctgtgctggtccgtggatcgtggctgtcatgcatggtttgctgtgtcttctacgatatgtacttccctttgttccgtatatgtacatcttcctcgtttggttcatgtattttcctttgaataataataaataaatcgggctttccatatcggatgcttttatatctgtgtgtatggagattgtggtatatggtttcatctcaagttgtttacgtcaagaactaaagatatttcctcaaaaaaaaagaactaaagatataatcaatgtcattaacataactcatttccatgaggagaggacgaaggacgaagtcataataagtagattggttgatattttataatcattcaaaactgcaggggttataagatcttcattttgtagaagttttagatcttccgaggggttctc

SEQ ID NO: 3157 - DNA, 4823 bp, Triticum aestivum
tttcggcggacgatgctctccgcaggttgcactggactagcttggtgtgaggcttgcaactttctcctgtgatgctcatcaacaaaatcggagatgtcggtcctcgacgcctgcggccgatcatttggcttggctgtcgaggtcctcgggtgccgtttgttcggaggggtcttgatgggtcgtcagcgaggaaatcggagttgcctgctcgtggagaggcgatgacgatgacattgcagcctcgacggtgtcctctcgtcagcagtatgtgtgtgatcttgtcagtgccaggtcggctggagtgccctattcgatgggcgtgttttaattaaccgggcaactctcttcttcttaatcagtgaaaatggcaagtcttttacctcgtttcaaaaagagttaaatgcactggaggtcctaaaggtttcgtcggggtgtcactttagtcctatttcttccaaaatgcacctttaggtcctaattctttattaattggttcacccgaggtccttttccacgagcgctcgctgaccagcacacgtgccgcattgacccatgccacatcgatagagggtctaaccgccaggcgagaagcttcgcaaagagacccccccccctcttagtggcaccctctctcctctttcacggtactttggcgacattggaggcgagcgacagaggcaaccggaggtgatctggaggtaatttgtgtgggtgcccgtgaagatgccccttctatgacggccagtgagcaatcctcctccatgttaccgtaagaaccctaatcttgtcgatgatcttctcctgtagctcttctaatatgtcataactttgtcataatcaatagttgtagtccttgatttactttgatttgcataacggtgatacggacacggcaaaaaggacacaccaccagcggcaacatacccgccgaagttggagcttgcttcgccgcgccggcggcggtgctgaggatgttgccatgctcctcatcttagttgtttccttgccgaggagcttgaagttccggccatggataggtttaggggacgcgcgcgccgagagagagagcagatttggggaagaaataaagccagggactggggaatgagaagataatgtttataaggggttttctgtaaaaagaaagagcaacctacgcagcccttctgtcgatttggcatgggtcaacgcaccacacgagcaggtcaacgagcgctcgtgagaaaaaggacctagggtaaaccacttactaaagaattaggacctaaaggtgcattttggacgaaataagactaaagtgacaccctgacgaattttttaggaccttgagtgcatttaactctttcaaaaaataaagatgctaaaaaaactaaatgcttaaaaatacatttttctatgggaatacttaaaaatactagtataatttgatggcttcctagtatatttctagggcttacaactaaatttatattcttggtctaaataaaattataatctgataaattatgtgatatgaatatagccatatgagaccataatttaattttacctgcaaaaagtaagtaatagtagtagtagtactacatactccctccgtccggaaatacttgtcgaagaatttgatgaaaatggatgcatctagaacaagaatacatctagatacatcaatctccctgacaagtatttccgagcggagggagtactagataatactccctccgttcctaaataattgtctttctagctatctcaaataaactacaacatacggatgtatgtagacatgttttagagtgtagattcactcattttgttccgtatgtagtcatttgttgaaatctctagagagacaattatttaggaacggagggagtaagataactaccctaaaaaaaaagataactgaaggttgccacctagcacattcacattggtacaacttggaaaagcacagccccgtcgtcctgctcccagttgagttcgcgacctacacaccggccatgccccgcttctcctccaccacgccaatgtcgccaccccgcctccgcctccgcctccgactctgcgcccgccactcctcctccacctctcatccctcacgcatctgggatccccacgccgccttcgccgccgcggcacagcgggcgagctctggcacgctcactacggaggacgcacaccacctgtttgacgaattgctgcggcggggcaatcctgtccaggagcgtcccttgaataaatttctggctgccctcgcccgcgcgcccgcgtccgcatcctgctgcgatggccccgccctggcagtcaccctcttcggccgtttgtcccgagacgtcggacgacgggtggcgcagccaaatgtcttcacctatggcgtcctcatggactgctgctgccgcgcttgccgcacagatctggtgctcgccttctttggccgtctcctcaagacgggcctggaggcaaaccaagtcgtcttcaacaccctcctcaagggcctttgccacacaaagcgggcggatgaggctctggacgtgctgcttcacaggatgcctgagctgggctgcactcctaatgtggtggcgtataacaccgttatccatggcttctttaaggaaggccatgtaagcaaggcctgcaatctgttccatgaaatggcgcagcagggcgttaagcctaatgtggtgacatataactcagttattgatgcgctgtgcaaggccagagccatggacaaggcagaggtggtccttcgtcagatgattgatgatggtgttggacctgataatgtgacgtatagtagcctcatccatggatattcctcttcaggccactggaaggaggcagttagggtattcaaagagatgacaagtcggagggttacagcagatgtgcatacttacaacatgtttatgacctttctttgcaaacatggaagaagcaaagaagctgcaggaatttttgataccatggctatcaagggcctgaaacctgacaacgtttcatatgctattcgccttcatgggtatgccaccgaaggatgcctagttgacatgatcaatctcttcaattccatggcaacacactgcattctacctaactgtcatatattcaacatactgattaatgcatatgctaaatctgggaagcttgataaggctatgcttatcttcaatgaaatgcagaaacaaggagtgagtccaaatgcagtcacatattcaaccgtaatacatgcattttgcaagaagggtaggttggatgatgctgtgataaagtttaatcagatgattgatacaggagtacgaccggacgcatctgtttatcgtcccctaatccagggtttttgtacacatggcgatttggtgaaagcaaaggaatatgttactgaaatgatgaagaaaggtatgcctcctcctgatattatgttcttcagttcaatcatgcagaacctatgcacagaaggaagggtaacagaagcacgggatatccttgacttgatagtgcacattggtatgaggcctaatgttatcatatttaatttgctgatcggtggatactgcctagtccgcaagatggcagatgcattgaaagtatttgatgatatggtgtcatatggtttagaaccttgtaactttacgtatggtatacttattaatggctattgcaaaaatagaaggattgatgacgggcttattctgttcaaagagatgctgcacaagggacttaaacctacaacttttaattataacgtcatactggatggattatttctggctggacaaactgttgctgcaaaagagaagtttgatgagatggttgaatctggagtaagtgtgtgcattgatacatactctataattcttggtggactttgtagaaatagctgcagtagcgaagcgatcacccttttccggaaattaagcgcaatgaatgtgaaatttgatattacaattgtcaatatcattattggtgccttatacagggtcgagagaaaccaagaggctaaggatttgtttgctgctatgccagccaatggcttggttcctaatgctgttacctacaccgtaatgatgacaaatcttataaaagaaggttcagtggaagaagctgacaatcttttcttatccatggagaagagcggctgtactgccaactcttgcctgttaaatcatatcatcagaaggttactggaaaaaggagagatagtcaaggctggaaattatatgtctaaagttgatgcaaagagctactcacttgaagctaaaactgtttcgctgctgatctctctgttttcaaggaaagggaaatatagagaacacatcaaattgcttcctacaaagtatcagtttctggaagaagcagccacagttgaataggcatccatggacgtggattgaattgaaggtgtactactgctgtgctggtccgtggatcgtggctgtcatgcatggtttgctgtgtcttctacgatatgtacttccctttgttccgtatatgtacatcttcctcgtttggttcatgtattttcctttgaataataataaataaatcgggctttccatatcggatgcttttatatctgtgtgtatggagattgtggtatatggtttcatctcaagttgtttacgtcaagaactaaagatatttcctcaaaaaaaaagaactaaagatataatcaatgtcattaacataactcatttccatgaggagaggacgaaggacgaagtcataataagtagattggttgatattttataatcattcaaaactgcaggggttataagatcttcattttgtagaagttttagatcttccgaggggttctc

SEQ ID NO: 3158 - DNA, 5179 bp, Triticum aestivum
cgaagatggtgatgcgcggagctgggtcgcggcttgtccttctgatatcggcggttcggttcccctttgggtgcgtctgtgcttgtttctcactgtgacagagaagttgaagctacatgcggcgggggccctgcggcaatgatgactccatgagggtggcttcggcggacgatgctctccgcaggttgcactggactagcttggtgtgaggcttgcaactttctcctgtgatgctcatcaacaaaatcggagatgtcggtcctcgacgcctgcggccgatcgtttggcttggctgtcgaggtcctcgggtgccgtttgttcggaggggtcttgatgggtcgtcagcgaggaaatcggagttgcctgctcgtggagaggcgatgacgatgacattgcttgcagcctcgacggtgtcctctcgtcagcagtatgtgtgtgatcttgtcagtgccaggtcggccggagtgctctattcgatgggcgtgttttaattaaccgggcaactctcttcttcttaatcaatgaaaatggcaagtcttttacctcgtttcaaaaagagttaaatgcactggaggtcctaaaggtttcgtcggggtgtcactttagtcctatttcttccaaaatgcacctttaggtcctaattctttattaattggttcacccgaggtccttttccacgagcgctagctgaccagcacacgtgccgcattgacccacgccacatcgatagagggtctaaccgccaggcgagaagcttcgcaaagagaccccccccctcttagtggcaccctctctcctctttcacggtactttggcgacattggaggcgagcgacagaggcaaccggaggtgatctggaggtaatttgtgtgggtgcccgtgaagatgccccttctacgacggccagtgagcaatcctcctccatgttaccgtaagaaccctaatcttgtcgacgatcttctcctgtagctcttctaatatgtcataactttgccataatcaatagttgtagtccttgatttactttgatttgcataacggtgctacggacatggcaaaaaggacacaccaccagcggcaacatacccgccgaagttggagcttgcttcgccgcaccggcggcggtgctgaggatgttgccatgctcctcatcttagttgtttccttgccgaggagcttgaagttccggccatggataggtttagggaacgcgcgcgccgagagagagagcagatttggggaagaaataaagccagggactggggaatgagaagataatgtttataaggggttttctgtaaaaagaaagagcaacctacgcggcccttctgtcgatttggcatgggtcaacgcaccacacgagcaggtcaacgagcgctcgtgagaaaaaggacctagggtaaaccacttactaaagaattaggacctaaaggtgcattttggacgaaataagactaaagtgacaccctgacgaattttttaggaccttgagtgcatttaactctttcaaaaaataaagatgctaaaaaaactaaatgcttaaaaatacatttttctatgggaatacttaaaaatactagtataatttgatggcttcctagtatatttctagcgcttacaactaaatttatattcttggtctaaataaaattataatctgataaattatgtgatatgtatatagccatatgagaccataatttaattttacctgcaaaaagtaagtaatagtaatagtagtactacatactccctccgtccgaaaatacttgtcgaagaatttgatgaaaatggatgcatctagaacaagaatacatctagatacatcaatctccccgacaagtatttccgaacggagggagtactagataataagataactatccaaaaaaaaaaagataactgaaggttgccacctagcacattcacattggtacaacttggaaaagcacagccccgtcgtcctgctcccagttgagttcgcgacctacacaccggccatgccccgcttctcctccaccacgccaatgtcgccaccccgcctccgcctccgactctgcgcccgccactcctcctccacctctcatccctcacgcatctgggatccccacgccgccttcgccgccgcggcacagcgggcgagctctggcacgctcactacggaggacgcacaccacctgtttgacgaattgctgcggcggggcaatcctgtccaggagcgtcccttgaataaatttctggctgccctcgcccgcgcgcccgcgtccgcatcctgctgcgatggccccgccctggcagtcgccctcttcggccgtttgtcccgagacgtcggacgacgggtggcgcagccaaatgtcttcacctatggcgtcctcatggactgctgctgccgcgcttgccgcacagatctggtgctcgccttctttggccgtctcctcaagacgggcctggaggcaaaccaagtcgtcttcaacaccctcctcaagggcctttgccacacaaagcgggcggatgaggctctggacgtgctgcttcacaggatgcctgagctgggctgcactcctaatgtggtggcgtataacaccgttatccatggcttctttaaggaaggccatgtaagcaaggcctgcaatctgttccatgaaatggcgcagcagggcgttaagcctaatgtggtgacatataactcagttatcgatgcgctgtgcaaggccagagccatggacaaggcagaggtggtccttcgtcagatgattgatgatggtgttggacctgataatgtgacgtatagtagcctcatccatggatattcctcttcaggccactggaaggaggcagttagggtattcaaagagatgacaagtcggagggttacagcagatgtgcatacttacaacatgtttatgacctttctttgcaaacatggaagaagcaaagaagctgcaggaatttttgataccatggctatcaagggcctgaaacctgacaacgtttcatatgctattctccttcatgggtatgccgccgaaggatgcttagttgatatgattaatctcttcaattcaatggaaagagattgtattctacctgactgtcgtatcttcaacatactgattaatgcatatgctaaatctgggaagcttgataaggctatgcttatcttcaatgaaatgcagaaacaaggagtgagtccaaatgcagtcacatattcaaccgtaatacatgcattttgcaagaagggtaggttggatgatgctgtgataaagtttaatcagatgattgatacaggagtacgaccggacgcatctgtttatcgtcccctaatccagggtttttgtacacatggcgatttggtgaaagcaaaggaatatgttactgaaatgatgaagaaaggtatgcctcctcctgatattatgttcttcagttcaatcatgcagaacctatgcacagaaggaagggtaacagaagcacgggatatccttgacttgatagtgcacattggtatgaggcctaatgttatcatatttaatttgctgatcggtggatactgcctagtccgcaagatggcagatgcattgaaagtatttgatgatatggtgtcatatggtttagaaccttgtaactttacgtatggtatacttattaatggctattgcaaaaatagaaggattgatgacgggcttattctgttcaaagagatgctgcacaagggacttaaacctacaacttttaattataacgtcatactggatggattatttctggctggacaaactgttgctgcaaaagagaagtttgatgagatggttgaatctggagtaagtgtgtgcattgatacatactctataattcttggtggactttgtagaaatagctgcagtagcgaagcgatcacccttttccggaaattaagcgcaatgaatgtgaaatttgatattacaattgtcaatatcattattggtgccttatacagggtcgagagaaaccaagaggctaaggatttgtttgctgctatgccagccaatggcttggttcctaatgctgttacctacaccgtaatgatgacaaatcttataaaagaaggttcagtggaagaagctgacaatcttttcttatccatggagaagagcggctgtactgccaactcttgcctgttaaatcatatcatcagaaggttactggaaaaaggagagatagtcaaggctggaaattatatgtctaaagttgatgcaaagagctactcacttgaagctaaaactgtttcgctgctgatctctctgttttcaaggaaagggaaatatagagaacacatcaaattgcttcctacaaagtatcagtttctggaagaagcagccacagttgaatagttggtacatgatatctgaaatttaatttgcatcgcttgccatgggtccgtctgcttgtacaagaaatgcattttctatttgtaaataggaagtcagtttagaacaagccatcaggatgacgcaaagagtacaattcagttgcaccaccaataaaaaggcagaactagggctgccaaaacaacactgaatcaaaactcaaacagaaggagcagcaaacttttttttttttgaagctggacagtctgctagccaaacaactacaggagactgtcaggcggggcatgtagtggctggcgtctaagcgcctttgcttcttccaccatccatggcttagcctcacacggaatcgagtcaaccaattcccgtcggttttgggtggctcccttgaagatgcaattgttttcagcggccagatacgcatggtcagattaatcagcgagtgtgccccttctgtctggttcgagaaagaatttgaagagctgagcttgtccctgctggaaccagtttgaggttagttaatcataacagggtactagagaggtgttttattgactgttgatgtgtaatatgttatatgccatcctcttgatgattacggtgatctgtgaagaggcagcatgcaaaagtctgaatcacatatgcttatgtaattgtgttattatttgtgcagcttctagaccttttgccttgtagatggctacatggatctagttgtagcaatctgtaactgttagtgttttgtatatgctggcattgatgattagggtgacttgtgaagcatgcagaagtctgaatcgtacatgcttgtctag

SEQ ID NO: 3159 - DNA, 5201 bp, Triticum aestivum
tttcggcggacgatgctctccgcaggttgcactggactagcttggtgtgaggcttgcaactttctcctgtgatgctcatcaacaaaatcggagatgtcggtcctcgacgcctgcggccgatcatttggcttggctgtcgaggtcctcgggtgccgtttgttcggaggggtcttgatgggtcgtcagcgaggaaatcggagttgcctgctcgtggagaggcgatgacgatgacattgcagcctcgacggtgtcctctcgtcagcagtatgtgtgtgatcttgtcagtgccaggtcggctggagtgccctattcgatgggcgtgttttaattaaccgggcaactctcttcttcttaatcagtgaaaatggcaagtcttttacctcgtttcaaaaagagttaaatgcactggaggtcctaaaggtttcgtcggggtgtcactttagtcctatttcttccaaaatgcacctttaggtcctaattctttattaattggttcacccgaggtccttttccacgagcgctcgctgaccagcacacgtgccgcattgacccatgccacatcgatagagggtctaaccgccaggcgagaagcttcgcaaagagacccccccccctcttagtggcaccctctctcctctttcacggtactttggcgacattggaggcgagcgacagaggcaaccggaggtgatctggaggtaatttgtgtgggtgcccgtgaagatgccccttctatgacggccagtgagcaatcctcctccatgttaccgtaagaaccctaatcttgtcgatgatcttctcctgtagctcttctaatatgtcataactttgtcataatcaatagttgtagtccttgatttactttgatttgcataacggtgatacggacacggcaaaaaggacacaccaccagcggcaacatacccgccgaagttggagcttgcttcgccgcgccggcggcggtgctgaggatgttgccatgctcctcatcttagttgtttccttgccgaggagcttgaagttccggccatggataggtttaggggacgcgcgcgccgagagagagagcagatttggggaagaaataaagccagggactggggaatgagaagataatgtttataaggggttttctgtaaaaagaaagagcaacctacgcagcccttctgtcgatttggcatgggtcaacgcaccacacgagcaggtcaacgagcgctcgtgagaaaaaggacctagggtaaaccacttactaaagaattaggacctaaaggtgcattttggacgaaataagactaaagtgacaccctgacgaattttttaggaccttgagtgcatttaactctttcaaaaaataaagatgctaaaaaaactaaatgcttaaaaatacatttttctatgggaatacttaaaaatactagtataatttgatggcttcctagtatatttctagggcttacaactaaatttatattcttggtctaaataaaattataatctgataaattatgtgatatgaatatagccatatgagaccataatttaattttacctgcaaaaagtaagtaatagtagtagtagtactacatactccctccgtccggaaatacttgtcgaagaatttgatgaaaatggatgcatctagaacaagaatacatctagatacatcaatctccctgacaagtatttccgagcggagggagtactagataatactccctccgttcctaaataattgtctttctagctatctcaaataaactacaacatacggatgtatgtagacatgttttagagtgtagattcactcattttgttccgtatgtagtcatttgttgaaatctctagagagacaattatttaggaacggagggagtaagataactaccctaaaaaaaaagataactgaaggttgccacctagcacattcacattggtacaacttggaaaagcacagccccgtcgtcctgctcccagttgagttcgcgacctacacaccggccatgccccgcttctcctccaccacgccaatgtcgccaccccgcctccgcctccgcctccgactctgcgcccgccactcctcctccacctctcatccctcacgcatctgggatccccacgccgccttcgccgccgcggcacagcgggcgagctctggcacgctcactacggaggacgcacaccacctgtttgacgaattgctgcggcggggcaatcctgtccaggagcgtcccttgaataaatttctggctgccctcgcccgcgcgcccgcgtccgcatcctgctgcgatggccccgccctggcagtcaccctcttcggccgtttgtcccgagacgtcggacgacgggtggcgcagccaaatgtcttcacctatggcgtcctcatggactgctgctgccgcgcttgccgcacagatctggtgctcgccttctttggccgtctcctcaagacgggcctggaggcaaaccaagtcgtcttcaacaccctcctcaagggcctttgccacacaaagcgggcggatgaggctctggacgtgctgcttcacaggatgcctgagctgggctgcactcctaatgtggtggcgtataacaccgttatccatggcttctttaaggaaggccatgtaagcaaggcctgcaatctgttccatgaaatggcgcagcagggcgttaagcctaatgtggtgacatataactcagttattgatgcgctgtgcaaggccagagccatggacaaggcagaggtggtccttcgtcagatgattgatgatggtgttggacctgataatgtgacgtatagtagcctcatccatggatattcctcttcaggccactggaaggaggcagttagggtattcaaagagatgacaagtcggagggttacagcagatgtgcatacttacaacatgtttatgacctttctttgcaaacatggaagaagcaaagaagctgcaggaatttttgataccatggctatcaagggcctgaaacctgacaacgtttcatatgctattcgccttcatgggtatgccaccgaaggatgcctagttgacatgatcaatctcttcaattccatggcaacacactgcattctacctaactgtcatatattcaacatactgattaatgcatatgctaaatctgggaagcttgataaggctatgcttatcttcaatgaaatgcagaaacaaggagtgagtccaaatgcagtcacatattcaaccgtaatacatgcattttgcaagaagggtaggttggatgatgctgtgataaagtttaatcagatgattgatacaggagtacgaccggacgcatctgtttatcgtcccctaatccagggtttttgtacacatggcgatttggtgaaagcaaaggaatatgttactgaaatgatgaagaaaggtatgcctcctcctgatattatgttcttcagttcaatcatgcagaacctatgcacagaaggaagggtaacagaagcacgggatatccttgacttgatagtgcacattggtatgaggcctaatgttatcatatttaatttgctgatcggtggatactgcctagtccgcaagatggcagatgcattgaaagtatttgatgatatggtgtcatatggtttagaaccttgtaactttacgtatggtatacttattaatggctattgcaaaaatagaaggattgatgacgggcttattctgttcaaagagatgctgcacaagggacttaaacctacaacttttaattataacgtcatactggatggattatttctggctggacaaactgttgctgcaaaagagaagtttgatgagatggttgaatctggagtaagtgtgtgcattgatacatactctataattcttggtggactttgtagaaatagctgcagtagcgaagcgatcacccttttccggaaattaagcgcaatgaatgtgaaatttgatattacaattgtcaatatcattattggtgccttatacagggtcgagagaaaccaagaggctaaggatttgtttgctgctatgccagccaatggcttggttcctaatgctgttacctacaccgtaatgatgacaaatcttataaaagaaggttcagtggaagaagctgacaatcttttcttatccatggagaagagcggctgtactgccaactcttgcctgttaaatcatatcatcagaaggttactggaaaaaggagagatagtcaaggctggaaattatatgtctaaagttgatgcaaagagctactcacttgaagctaaaactgtttcgctgctgatctctctgttttcaaggaaagggaaatatagagaacacatcaaattgcttcctacaaagtatcagtttctggaagaagcagccacagttgaatagttggtacatgatatctgaaatttaatttgcatcgcttgccatgggtccgtctgcttgtacaagaaatgcattttctatttgtaaataggaagtcagtttagaacaagccatcaggatgacgcaaagagtacaattcagttgcaccaccaataaaaaggcagaactagggctgccaaaacaacactgaatcaaaactcaaacagaaggagcagcaaacttttttttttgaagctggacagtctgctagccaaacaactacaggagactgtcaggcggggcatgtagtggctggcgtctaagcgcctttgcttcttccaccatccatggcttagcctcacacggaatcgagtcaaccaattcccgtcggttttgggtggctcccttgaagatgcaattgttttcagcggccagatacgcatggtcagattaatcagcgagtgtgccccttctgtctggttcgagaaagaatttgaagagctgagcttgtcccagctggaaccagtttgaggttagttaatcataacagggtactagagaggtgttttattgactgttgatgtgtaatatgttatatgccatcctcttgatgattacggtgatctgtgaagaggcagcatgcaaaagtctgaatcacatatgcttatgtaattgtgttattatttgtgcagcttctagaccttttgccttgtagatggctacatggatctagttgtagcaatctgtaactgttagtgttttgtatatgctggcattgatgattagggtgacttgtgaagcatgcagaagtctgaatcatacatgcttgtctagttatttttggggctctct

SEQ ID NO: 3160 - DNA, 812 bp, Triticum aestivum
ttggtacatgatatctgaaatttaatttgcatcgcttgccatgggtccgtctgcttgtacaagaaatgcattttctatttgtaaataggaagtcagtttagaacaagccatcaggatgacgcaaagagtacaattcagttgcaccaccaataaaaaggcagaactagggctgccaaaacaacactgaatcaaaactcaaacagaaggagcagcaaacttttttttttttgaagctggacagtctgctagccaaacaactacaggagactgtcaggcggggcatgtagtggctggcgtctaagcgcctttgcttcttccaccatccatggcttagcctcacacggaatcgagtcaaccaattcccgtcggttttgggtggctcccttgaagatgcaattgttttcagcggccagatacgcatggtcagattaatcagcgagtgtgccccttctgtctggttcgagaaagaatttgaagagctgagcttgtccctgctggaaccagtttgaggttagttaatcataacagggtactagagaggtgttttattgactgttgatgtgtaatatgttatatgccatcctcttgatgattacggtgatctgtgaagaggcagcatgcaaaagtctgaatcacatatgcttatgtaattgtgttattatttgtgcagcttctagaccttttgccttgtagatggctacatggatctagttgtagcaatctgtaactgttagtgttttgtatatgctggcattgatgattagggtgacttgtgaagcatgcagaagtctgaatcgtacatgcttgtctag

SEQ ID NO: 3161 - DNA, 828 bp, Triticum aestivum
ttggtacatgatatctgaaatttaatttgcatcgcttgccatgggtccgtctgcttgtacaagaaatgcattttctatttgtaaataggaagtcagtttagaacaagccatcaggatgacgcaaagagtacaattcagttgcaccaccaataaaaaggcagaactagggctgccaaaacaacactgaatcaaaactcaaacagaaggagcagcaaacttttttttttgaagctggacagtctgctagccaaacaactacaggagactgtcaggcggggcatgtagtggctggcgtctaagcgcctttgcttcttccaccatccatggcttagcctcacacggaatcgagtcaaccaattcccgtcggttttgggtggctcccttgaagatgcaattgttttcagcggccagatacgcatggtcagattaatcagcgagtgtgccccttctgtctggttcgagaaagaatttgaagagctgagcttgtcccagctggaaccagtttgaggttagttaatcataacagggtactagagaggtgttttattgactgttgatgtgtaatatgttatatgccatcctcttgatgattacggtgatctgtgaagaggcagcatgcaaaagtctgaatcacatatgcttatgtaattgtgttattatttgtgcagcttctagaccttttgccttgtagatggctacatggatctagttgtagcaatctgtaactgttagtgttttgtatatgctggcattgatgattagggtgacttgtgaagcatgcagaagtctgaatcatacatgcttgtctagttatttttggggctctct

SEQ ID NO: 3162 - DNA, 1837 bp, Triticum aestivum
tttcggcggacgatgctctccgcaggttgcactggactagcttggtgtgaggcttgcaactttctcctgtgatgctcatcaacaaaatcggagatgtcggtcctcgacgcctgcggccgatcatttggcttggctgtcgaggtcctcgggtgccgtttgttcggaggggtcttgatgggtcgtcagcgaggaaatcggagttgcctgctcgtggagaggcgatgacgatgacattgcagcctcgacggtgtcctctcgtcagcagtatgtgtgtgatcttgtcagtgccaggtcggctggagtgccctattcgatgggcgtgttttaattaaccgggcaactctcttcttcttaatcagtgaaaatggcaagtcttttacctcgtttcaaaaagagttaaatgcactggaggtcctaaaggtttcgtcggggtgtcactttagtcctatttcttccaaaatgcacctttaggtcctaattctttattaattggttcacccgaggtccttttccacgagcgctcgctgaccagcacacgtgccgcattgacccatgccacatcgatagagggtctaaccgccaggcgagaagcttcgcaaagagacccccccccctcttagtggcaccctctctcctctttcacggtactttggcgacattggaggcgagcgacagaggcaaccggaggtgatctggaggtaatttgtgtgggtgcccgtgaagatgccccttctatgacggccagtgagcaatcctcctccatgttaccgtaagaaccctaatcttgtcgatgatcttctcctgtagctcttctaatatgtcataactttgtcataatcaatagttgtagtccttgatttactttgatttgcataacggtgatacggacacggcaaaaaggacacaccaccagcggcaacatacccgccgaagttggagcttgcttcgccgcgccggcggcggtgctgaggatgttgccatgctcctcatcttagttgtttccttgccgaggagcttgaagttccggccatggataggtttaggggacgcgcgcgccgagagagagagcagatttggggaagaaataaagccagggactggggaatgagaagataatgtttataaggggttttctgtaaaaagaaagagcaacctacgcagcccttctgtcgatttggcatgggtcaacgcaccacacgagcaggtcaacgagcgctcgtgagaaaaaggacctagggtaaaccacttactaaagaattaggacctaaaggtgcattttggacgaaataagactaaagtgacaccctgacgaattttttaggaccttgagtgcatttaactctttcaaaaaataaagatgctaaaaaaactaaatgcttaaaaatacatttttctatgggaatacttaaaaatactagtataatttgatggcttcctagtatatttctagggcttacaactaaatttatattcttggtctaaataaaattataatctgataaattatgtgatatgaatatagccatatgagaccataatttaattttacctgcaaaaagtaagtaatagtagtagtagtactacatactccctccgtccggaaatacttgtcgaagaatttgatgaaaatggatgcatctagaacaagaatacatctagatacatcaatctccctgacaagtatttccgagcggagggagtactagataataagataactaccctaaaaaaaaagataactgaaggttgccacctagcacattcacattggtacaacttggaaaagcacagccccgtcgtcctgctcccagttgagttcgcgacctacacaccggcc

SEQ ID NO: 3163 - DNA, 4660 bp, Triticum aestivum
tttcggcggacgatgctctccgcaggttgcactggactagcttggtgtgaggcttgcaactttctcctgtgatgctcatcaacaaaatcggagatgtcggtcctcgacgcctgcggccgatcatttggcttggctgtcgaggtcctcgggtgccgtttgttcggaggggtcttgatgggtcgtcagcgaggaaatcggagttgcctgctcgtggagaggcgatgacgatgacattgcagcctcgacggtgtcctctcgtcagcagtatgtgtgtgatcttgtcagtgccaggtcggctggagtgccctattcgatgggcgtgttttaattaaccgggcaactctcttcttcttaatcagtgaaaatggcaagtcttttacctcgtttcaaaaagagttaaatgcactggaggtcctaaaggtttcgtcggggtgtcactttagtcctatttcttccaaaatgcacctttaggtcctaattctttattaattggttcacccgaggtccttttccacgagcgctcgctgaccagcacacgtgccgcattgacccatgccacatcgatagagggtctaaccgccaggcgagaagcttcgcaaagagacccccccccctcttagtggcaccctctctcctctttcacggtactttggcgacattggaggcgagcgacagaggcaaccggaggtgatctggaggtaatttgtgtgggtgcccgtgaagatgccccttctatgacggccagtgagcaatcctcctccatgttaccgtaagaaccctaatcttgtcgatgatcttctcctgtagctcttctaatatgtcataactttgtcataatcaatagttgtagtccttgatttactttgatttgcataacggtgatacggacacggcaaaaaggacacaccaccagcggcaacatacccgccgaagttggagcttgcttcgccgcgccggcggcggtgctgaggatgttgccatgctcctcatcttagttgtttccttgccgaggagcttgaagttccggccatggataggtttaggggacgcgcgcgccgagagagagagcagatttggggaagaaataaagccagggactggggaatgagaagataatgtttataaggggttttctgtaaaaagaaagagcaacctacgcagcccttctgtcgatttggcatgggtcaacgcaccacacgagcaggtcaacgagcgctcgtgagaaaaaggacctagggtaaaccacttactaaagaattaggacctaaaggtgcattttggacgaaataagactaaagtgacaccctgacgaattttttaggaccttgagtgcatttaactctttcaaaaaataaagatgctaaaaaaactaaatgcttaaaaatacatttttctatgggaatacttaaaaatactagtataatttgatggcttcctagtatatttctagggcttacaactaaatttatattcttggtctaaataaaattataatctgataaattatgtgatatgaatatagccatatgagaccataatttaattttacctgcaaaaagtaagtaatagtagtagtagtactacatactccctccgtccggaaatacttgtcgaagaatttgatgaaaatggatgcatctagaacaagaatacatctagatacatcaatctccctgacaagtatttccgagcggagggagtactagataataagataactaccctaaaaaaaaagataactgaaggttgccacctagcacattcacattggtacaacttggaaaagcacagccccgtcgtcctgctcccagttgagttcgcgacctacacaccggccatgccccgcttctcctccaccacgccaatgtcgccaccccgcctccgcctccgcctccgactctgcgcccgccactcctcctccacctctcatccctcacgcatctgggatccccacgccgccttcgccgccgcggcacagcgggcgagctctggcacgctcactacggaggacgcacaccacctgtttgacgaattgctgcggcggggcaatcctgtccaggagcgtcccttgaataaatttctggctgccctcgcccgcgcgcccgcgtccgcatcctgctgcgatggccccgccctggcagtcaccctcttcggccgtttgtcccgagacgtcggacgacgggtggcgcagccaaatgtcttcacctatggcgtcctcatggactgctgctgccgcgcttgccgcacagatctggtgctcgccttctttggccgtctcctcaagacgggcctggaggcaaaccaagtcgtcttcaacaccctcctcaagggcctttgccacacaaagcgggcggatgaggctctggacgtgctgcttcacaggatgcctgagctgggctgcactcctaatgtggtggcgtataacaccgttatccatggcttctttaaggaaggccatgtaagcaaggcctgcaatctgttccatgaaatggcgcagcagggcgttaagcctaatgtggtgacatataactcagttattgatgcgctgtgcaaggccagagccatggacaaggcagaggtggtccttcgtcagatgattgatgatggtgttggacctgataatgtgacgtatagtagcctcatccatggatattcctcttcaggccactggaaggaggcagttagggtattcaaagagatgacaagtcggagggttacagcagatgtgcatacttacaacatgtttatgacctttctttgcaaacatggaagaagcaaagaagctgcaggaatttttgataccatggctatcaagggcctgaaacctgacaacgtttcatatgctattcgccttcatgggtatgccaccgaaggatgcctagttgacatgatcaatctcttcaattccatggcaacacactgcattctacctaactgtcatatattcaacatactgattaatgcatatgctaaatctgggaagcttgataaggctatgcttatcttcaatgaaatgcagaaacaaggagtgagtccaaatgcagtcacatattcaaccgtaatacatgcattttgcaagaagggtaggttggatgatgctgtgataaagtttaatcagatgattgatacaggagtacgaccggacgcatctgtttatcgtcccctaatccagggtttttgtacacatggcgatttggtgaaagcaaaggaatatgttactgaaatgatgaagaaaggtatgcctcctcctgatattatgttcttcagttcaatcatgcagaacctatgcacagaaggaagggtaacagaagcacgggatatccttgacttgatagtgcacattggtatgaggcctaatgttatcatatttaatttgctgatcggtggatactgcctagtccgcaagatggcagatgcattgaaagtatttgatgatatggtgtcatatggtttagaaccttgtaactttacgtatggtatacttattaatggctattgcaaaaatagaaggattgatgacgggcttattctgttcaaagagatgctgcacaagggacttaaacctacaacttttaattataacgtcatactggatggattatttctggctggacaaactgttgctgcaaaagagaagtttgatgagatggttgaatctggagtaagtgtgtgcattgatacatactctataattcttggtggactttgtagaaatagctgcagtagcgaagcgatcacccttttccggaaattaagcgcaatgaatgtgaaatttgatattacaattgtcaatatcattattggtgccttatacagggtcgagagaaaccaagaggctaaggatttgtttgctgctatgccagccaatggcttggttcctaatgctgttacctacaccgtaatgatgacaaatcttataaaagaaggttcagtggaagaagctgacaatcttttcttatccatggagaagagcggctgtactgccaactcttgcctgttaaatcatatcatcagaaggttactggaaaaaggagagatagtcaaggctggaaattatatgtctaaagttgatgcaaagagctactcacttgaagctaaaactgtttcgctgctgatctctctgttttcaaggaaagggaaatatagagaacacatcaaattgcttcctacaaagtatcagtttctggaagaagcagccacagttgaataggcatccatggacgtggattgaattgaaggtgtactactgctgtgctggtccgtggatcgtggctgtcatgcatggtttgctgtgtcttctacgatatgtacttccctttgttccgtatatgtacatcttcctcgtttggttcatgtattttcctttgaataataataaataaatcgggctttccatatcggatgcttttatatctgtgtgtatggagattgtggtatatggtttcatctcaagttgtttacgtcaagaactaaagatatttcctcaaaaaaaaagaactaaagatataatcaatgtcattaacataactcatttccatgaggagaggacgaaggacgaagtcataataagtagattggttgatattttataatcattcaaaactgcaggggttataagatcttcattttgtagaagttttagatcttccgaggggttctc

SEQ ID NO: 3164 - DNA, 3822 bp, Triticum aestivum
atgagcaagctggagaagttcaccaactgctactccctgagcaagaccctcaggttcaaggccatcccagtgggcaagacccaagagaacatcgacaacaagaggctgctcgtggaggacgagaagagggccgaggactacaagggcgtgaagaagctcctggaccgctactacctgtccttcatcaacgacgtcctgcactccatcaagctcaagaacctcaacaactacatctccctcttcaggaagaagaccaggaccgagaaggagaacaaggagctggagaacctggagatcaacctccgcaaggagatcgccaaggccttcaagggcaacgagggctacaagtccctcttcaagaaggacatcatcgagaccatcctcccagagttcctcgacgacaaggacgagatcgccctcgtcaactccttcaacggcttcaccaccgccttcaccggcttcttcgacaaccgcgagaatatgttctccgaggaagccaagtccacctccatcgccttcaggtgcatcaacgagaacctcacccgctacatcagcaacatggacatcttcgagaaggtcgacgccatcttcgacaagcacgaggtccaggagatcaaggagaagatcctgaacagcgactacgacgtcgaggacttcttcgagggcgagttcttcaacttcgtgctgacccaagagggcatcgacgtgtacaacgccatcatcggcggcttcgtgaccgagtccggcgagaagatcaagggcctcaacgagtacatcaacctctacaaccagaagaccaagcagaagctcccaaagttcaagccactgtacaagcaagtcctcagcgaccgcgagtccctgagcttctacggcgagggctacacctccgacgaggaagtgctggaggtgttcaggaacaccctcaacaagaactccgagatcttctccagcatcaagaagctggagaaactgttcaagaacttcgacgagtactccagcgccggcatcttcgtgaagaacggcccagccatctccaccatctccaaggacatcttcggcgagtggaacgtcatccgcgacaagtggaacgccgagtacgacgacatccacctgaagaagaaggccgtcgtgaccgagaagtacgaggacgaccgccgcaagagcttcaagaagatcggctccttcagcctggagcaactccaggagtacgccgacgccgacctctccgtcgtggagaagctcaaggagatcatcatccaaaaggtggacgagatctacaaggtgtacggcagctccgagaaactgttcgacgccgacttcgtgctggagaagtccctcaagaagaacgacgccgtggtcgccatcatgaaggacctgctcgactccgtcaagagcttcgagaactacatcaaggccttcttcggcgagggcaaggagaccaacagggacgagtccttctacggcgacttcgtcctcgcctacgacatcctcctgaaggtcgaccacatctacgacgccatcaggaactacgtgacccaaaagccatacagcaaggacaagttcaagctctacttccagaacccacaattcatgggcggctgggacaaggacaaggagaccgactacagggccaccatcctccgctacggcagcaagtactacctggccatcatggacaagaagtacgccaagtgcctccagaagatcgacaaggacgacgtgaacggcaactacgagaagatcaactacaagctgctcccaggcccaaacaagatgctcccaaaggtgttcttctccaagaagtggatggcctactacaacccaagcgaggacatccaaaagatctacaagaacggcaccttcaagaagggcgacatgttcaacctcaacgactgccacaagctcatcgacttcttcaaggactccatcagccgctacccaaagtggagcaacgcctacgacttcaacttctccgagaccgagaagtacaaggacatcgccggcttctacagggaggtcgaggagcaaggctacaaggtgtccttcgagtccgccagcaagaaggaagtggacaagctcgtggaggaaggcaagctgtacatgttccagatctacaacaaggacttctccgacaagagccacggcaccccaaacctccacaccatgtacttcaagctcctgttcgacgagaacaaccacggccaaatcaggctctccggcggcgccgagctgttcatgcgcagggccagcctcaagaaggaggagctcgtcgtgcacccagccaacagcccaatcgccaacaagaacccagacaacccaaagaagaccaccaccctctcctacgacgtgtacaaggacaagaggttcagcgaggaccaatacgagctgcacatcccaatcgccatcaacaagtgcccaaagaatatcttcaagatcaacaccgaggtgcgcgtcctgctcaagcacgacgacaacccatacgtcatcggcatcgacaggggcgagcgcaacctgctctacatcgtggtcgtggacggcaagggcaacatcgtggagcaatacagcctcaacgagatcatcaacaacttcaacggcatcaggatcaagaccgactaccactccctgctcgacaagaaggagaaggagaggttcgaggccaggcaaaactggacctccatcgagaacatcaaggagctgaaggccggctacatctcccaggtggtccacaagatctgcgagctcgtggagaagtacgacgccgtgatcgccctggaggacctcaacagcggcttcaagaacagccgcgtcaaggtggagaagcaagtctaccaaaagttcgagaagatgctgatcgacaagctgaactacatggtggacaagaagtccaacccatgcgccaccggcggcgccctcaagggctaccaaatcaccaacaagttcgagagcttcaagtccatgagcacccaaaacggcttcatcttctacatcccagcctggctcaccagcaagatcgacccatccaccggcttcgtcaacctgctcaagaccaagtacaccagcatcgccgacagcaagaagttcatctccagcttcgaccgcatcatgtatgtgccagaggaagacctcttcgagttcgccctggactacaagaacttctccaggaccgacgccgactacatcaagaagtggaagctctactcctacggcaacaggatccgcatcttcaggaacccaaagaagaacaacgtgttcgactgggaggaagtgtgcctgacctccgcctacaaggagctgttcaacaagtacggcatcaactaccagcaaggcgacatccgcgccctgctctgcgagcagagcgacaaggccttctacagctccttcatggccctgatgagcctcatgctgcaaatgcgcaactccatcaccggccgcaccgacgtggacttcctcatcagcccagtcaagaacagcgacggcatcttctacgactcccgcaactacgaggcccaagagaacgccatcctgccaaagaacgccgacgccaacggcgcctacaacatcgcccgcaaggtgctgtgggccatcggccaattcaagaaggccgaggacgagaagctggacaaggtgaagatcgccatcagcaacaaggagtggctggagtacgcccaaacctccgtgaagcacaagcgcccagccgccaccaagaaggcgggccaagccaagaagaagaagggcagctacccatacgacgtgccagactacgcctacccatacgacgtcccagactacgcctacccatacgacgtgccagactacgcctga

SEQ ID NO: 3165 - DNA, 4104 bp, Triticum aestivum
atggacaagaagtacagcatcgggctcgacatcgggacgaacagcgttgggtgggcggtcatcacggacgagtacaaggttccctccaagaagttcaaggtgctggggaacaccgaccgccactccatcaagaagaacctcatcggggccctcctgttcgacagcggggagaccgctgaggctacgaggctcaagagaaccgcgaggcgcagatacacgagaaggaagaacaggatctgctacctccaagagatcttctccaacgagatggccaaggttgacgattcattcttccaccgcctggaggagtctttcctcgtggaggaggacaagaagcacgagcggcatcccatcttcgggaacatcgtcgacgaggttgcctaccacgagaagtaccctacgatctaccatctgcggaagaagctcgtggacagcaccgataaggcggacctcagactgatctacctcgccctggcgcacatgatcaagttccgcgggcatttcctgatcgagggggatctcaacccagacaactccgatgttgacaagctgttcatccaactcgtgcagacctacaaccaactcttcgaggagaacccgatcaacgcttcgggggtcgacgctaaggccatcctgtcagcccgcctctcgaagtcacgcaggctggagaacctgatcgcgcagctcccaggggagaagaagaacgggctgttcgggaacctcatcgctctctctctggggctcacgccgaacttcaagtccaacttcgatctcgccgaggacgcgaagctgcaactcagcaaggacacctacgacgatgacctcgataacctcctggcgcagatcggggatcaatacgctgacctgttcctcgccgcgaagaacctgtcggacgccatcctcctgtcagatatcctccgcgtgaacaccgagatcacgaaggccccactctctgcgtccatgatcaagcgctacgacgagcaccatcaggatctgaccctcctgaaggcgctggtccgccaacagctcccggagaagtacaaggagatcttcttcgatcagtcgaagaacgggtacgctgggtacatcgacgggggggcgtcacaagaggagttctacaagttcatcaagccaatcctggagaagatggacgggacggaggagctcctggtgaagctcaacagggaggacctcctgcggaagcagagaaccttcgataacgggtccatcccccaccaaatccatctcggggagctgcacgccatcctgagaaggcaagaggacttctaccctttcctcaaggataaccgggagaagatcgagaagatcctgaccttcagaatcccatactacgtcgggccgctcgctcgggggaacagcagattcgcctggatgacccgcaagtcggaggagaccatcacgccgtggaacttcgaggaggtggtcgacaagggggcgagcgctcagtcgttcatcgagaggatgaccaacttcgacaagaacctgcccaacgagaaggtgctccctaagcactcgctcctgtacgagtacttcaccgtctacaacgagctcacgaaggtgaagtatgtgaccgaggggatgagaaagcctgccttcctgtccggggagcagaagaaggcgatcgtggacctcctgttcaagaccaaccggaaggtcacggttaagcaactcaaggaggactacttcaagaagatcgagtgcttcgattcggtggagatctcaggggtcgaggacaggttcaacgcctccctcgggacctaccacgatctcctgaagatcatcaaggataaggacttcctggacaacgaggagaacgaggacatcctggaggacatcgtgctgaccctcacgctgttcgaggacagggagatgatcgaggagcgcctgaagacgtacgcccatctcttcgatgacaaggtcatgaagcaactcaagagaagaagatacaccgggtgggggaggctgtcccgcaagctcatcaacgggatccgggacaagcagtcagggaagaccatcctcgacttcctgaagtctgatgggttcgccaacaggaacttcatgcaactgatccacgatgactcactcaccttcaaggaggatatccaaaaggctcaggtgagcgggcagggggactcgctgcacgagcatatcgctaacctcgctgggtcccctgcgatcaagaaggggatcctgcagaccgtgaaggttgtggacgagctcgtgaaggtcatggggcggcataagcctgagaacatcgtcatcgagatggccagagagaaccaaaccacgcagaaggggcaaaagaactctagggagcgcatgaagcgcatcgaggaggggatcaaggagctggggtcccaaatcctcaaggagcacccagttgagaacacccaactgcagaacgagaagctctacctgtactacctccagaacgggagggatatgtatgtggaccaagagctggatatcaaccgcctcagcgattacgacgttgatcatatcgtgccccagtctttcctgaaggatgactccatcgacaacaaggtcctcaccaggtcggacaagaaccgcgggaagtcagataacgttccatctgaggaggtcgttaagaagatgaagaactactggaggcagctcctgaacgccaagctgatcacgcaaaggaagttcgacaacctcaccaaggctgagagaggggggctctcagagctggacaaggctgggttcatcaagcggcagctggtcgagaccagacaaatcacgaagcacgttgcgcaaatcctcgactctcggatgaacacgaagtacgatgagaacgacaagctgatcagggaggtgaaggtcatcaccctgaagtctaagctcgtctccgacttccgcaaggacttccagttctacaaggttcgcgagatcaacaactaccaccatgcgcatgacgcttacctcaacgctgtggtcgggaccgccctgatcaagaagtacccgaagctggagagcgagttcgtgtacggggactacaaggtttacgatgtgcgcaagatgatcgccaagtcggagcaagagatcgggaaggccaccgccaagtacttcttctactcaaacatcatgaacttctttaagaccgagatcacgctggccaacggggagatccggaagagacccctcatcgagaccaacggggagacgggggagatcgtgtgggacaaggggagggatttcgcgaccgtccgcaaggttctctccatgccccaggtgaacatcgtcaagaagaccgaggtccaaacgggggggttctcaaaggagtctatcctgcctaagcggaacagcgacaagctcatcgccagaaagaaggactgggatccaaagaagtacggggggttcgacagccctaccgtcgcgtactcggttctggttgtggctaaggttgagaaggggaagtccaagaagctcaagagcgtgaaggagctcctggggatcaccatcatggagcgctccagcttcgagaagaacccaatcgacttcctggaggccaaggggtacaaggaggtgaagaaggacctgatcatcaagctcccgaagtactctctcttcgagctggagaacgggaggaagcgcatgctggcttccgctggggagctccaaaaggggaacgagctcgccctgccatccaagtatgtgaacttcctctacctggcgtcccactacgagaagctcaaggggagcccggaggacaacgagcaaaagcagctgttcgtcgagcagcacaagcattacctcgacgagatcatcgagcaaatctccgagttctccaagcgcgtgatcctcgcggacgctaacctggataaggtcctctccgcttacaacaagcaccgggacaagcccatcagagagcaggccgagaacatcatccatctcttcaccctgacgaacctcggggcccctgctgccttcaagtacttcgacaccacgatcgatcggaagagatacaccagcacgaaggaggtcctggacgcgaccctcatccaccaatctatcacggggctgtacgagacgagaatcgacctgtcacaactggggggggac

SEQ ID NO: 3166 - DNA, 7428 bp, Triticum aestivum
gaccaagcccgttattctgacagttctggtgctcaacacatttatatttatcaaggagcacattgttactcactgctaggagggaatcgaactaggaatattgatcagaggaactacgagagagctgaagataactgccctctagctctcactgatctgggtcgcatagtgagatgcagcccacgtgagttcagcaacggtctagcgctgggcttttaggcccgcatgatcgggcttttgtcgggtggtcgacgtgttcacgattggggagagcaacgcagcagttcctcttagtttagtcccacctcgcctgtccagcagagttctgaccggtttataaactcgcttgctgcatcagacttggaaagacaattatttaggaagttttagagctagaaatagcaagttaaaataaggctagtccgttatcaacttgaaaaagtggcaccgagtcggtgctttttttgaccaagcccgttattctgacagttctggtgctcaacacatttatatttatcaaggagcacattgttactcactgctaggagggaatcgaactaggaatattgatcagaggaactacgagagagctgaagataactgccctctagctctcactgatctgggtcgcatagtgagatgcagcccacgtgagttcagcaacggtctagcgctgggcttttaggcccgcatgatcgggcttttgtcgggtggtcgacgtgttcacgattggggagagcaacgcagcagttcctcttagtttagtcccacctcgcctgtccagcagagttctgaccggtttataaactcgcttgctgcatcagacttggacaattatttaggaacggagttttagagctagaaatagcaagttaaaataaggctagtccgttatcaacttgaaaaagtggcaccgagtcggtgctttttttgtgtggcaaacagctattatgggtattatgggtggagtgcagcgtgacccggtcgtgcccctctctagagataatgagcattgcatgtctaagttataaaaaattaccacatattttttttgtcacacttgtttgaagtgcagtttatctatctttatacatatatttaaactttactctacgaataatataatctatagtactacaataatatcagtgttttagagaatcatataaatgaacagttagacatggtctaaaggacaattgagtattttgacaacaggactctacagttttatctttttagtgtgcatgtgttctcctttttttttgcaaatagcttcacctatataatacttcatccattttattagtacatccatttagggtttagggttaatggtttttatagactaatttttttagtacatctattttattctattttagcctctaaattaagaaaactaaaactctattttagtttttttatttaataatttagatataaaatagaataaaataaagtgactaaaaattaaacaaataccctttaagaaattaaaaaaactaaggaaacatttttcttgtttcgagtagataatgccagcctgttaaacgccgtcgacgagtctaacggacaccaaccagcgaaccagcagcgtcgcgtcgggccaagcgaagcagacggcacggcatctctgtcgctgcctctggacccctctcgagagttccgctccaccgttggacttgctccgctgtcggcatccagaaattgcgtggcggagcggcagacgtgagccggcacggcaggcggcctcctcctcctctcacggcaccggcagctacgggggattcctttcccaccgctccttcgctttcccttcctcgcccgccgtaataaatagacaccccctccacaccctctttccccaacctcgtgttgttcggagcgcacacacacacaaccagatctcccccaaatccacccgtcggcacctccgcttcaaggtacgccgctcgtcctccccccccccccctctctaccttctctagatcggcgttccggtccatggttagggcccggtagttctacttctgttcatgtttgtgttagatccgtgtttgtgttagatccgtgctgctagcgttcgtacacggatgcgacctgtacgtcagacacgttctgattgctaacttgccagtgtttctctttggggaatcctgggatggctctagccgttccgcagacgggatcgatttcatgattttttttgtttcgttgcatagggtttggtttgcccttttcctttatttcaatatatgccgtgcacttgtttgtcgggtcatcttttcatgcttttttttgtcttggttgtgatgatgtggtctggttgggcggtcgttctagatcggagtagaattaattctgtttcaaactacctggtggatttattaattttggatctgtatgtgtgtgccatacatattcatagttacgaattgaagatgatggatggaaatatcgatctaggataggtatacatgttgatgcgggttttactgatgcatatacagagatgctttttgttcgcttggttgtgatgatgtggtgtggttgggcggtcgttcattcgttctagatcggagtagaatactgtttcaaactacctggtgtatttattaattttggaactgtatgtgtgtgtcatacatcttcatagttacgagtttaagatggatggaaatatcgatctaggataggtatacatgttgatgtgggttttactgatgcatatacatgatggcatatgcagcatctattcatatgctctaaccttgagtacctatctattataataaacaagtatgttttataattattttgatcttgatatacttggatgatggcatatgcagcagctatatgtggatttttttagccctgccttcatacgctatttatttgcttggtactgtttcttttgtcgatgctcaccctgttgtttggtgttacttctgcaggtctccaccatggctcctaagaagaagcgcaaggttgggatccacggggttccggcggctatggacaagaagtacagcatcgggctcgacatcgggacgaacagcgttgggtgggcggtcatcacggacgagtacaaggttccctccaagaagttcaaggtgctggggaacaccgaccgccactccatcaagaagaacctcatcggggccctcctgttcgacagcggggagaccgctgaggctacgaggctcaagagaaccgcgaggcgcagatacacgagaaggaagaacaggatctgctacctccaagagatcttctccaacgagatggccaaggttgacgattcattcttccaccgcctggaggagtctttcctcgtggaggaggacaagaagcacgagcggcatcccatcttcgggaacatcgtcgacgaggttgcctaccacgagaagtaccctacgatctaccatctgcggaagaagctcgtggacagcaccgataaggcggacctcagactgatctacctcgccctggcgcacatgatcaagttccgcgggcatttcctgatcgagggggatctcaacccagacaactccgatgttgacaagctgttcatccaactcgtgcagacctacaaccaactcttcgaggagaacccgatcaacgcttcgggggtcgacgctaaggccatcctgtcagcccgcctctcgaagtcacgcaggctggagaacctgatcgcgcagctcccaggggagaagaagaacgggctgttcgggaacctcatcgctctctctctggggctcacgccgaacttcaagtccaacttcgatctcgccgaggacgcgaagctgcaactcagcaaggacacctacgacgatgacctcgataacctcctggcgcagatcggggatcaatacgctgacctgttcctcgccgcgaagaacctgtcggacgccatcctcctgtcagatatcctccgcgtgaacaccgagatcacgaaggccccactctctgcgtccatgatcaagcgctacgacgagcaccatcaggatctgaccctcctgaaggcgctggtccgccaacagctcccggagaagtacaaggagatcttcttcgatcagtcgaagaacgggtacgctgggtacatcgacgggggggcgtcacaagaggagttctacaagttcatcaagccaatcctggagaagatggacgggacggaggagctcctggtgaagctcaacagggaggacctcctgcggaagcagagaaccttcgataacgggtccatcccccaccaaatccatctcggggagctgcacgccatcctgagaaggcaagaggacttctaccctttcctcaaggataaccgggagaagatcgagaagatcctgaccttcagaatcccatactacgtcgggccgctcgctcgggggaacagcagattcgcctggatgacccgcaagtcggaggagaccatcacgccgtggaacttcgaggaggtggtcgacaagggggcgagcgctcagtcgttcatcgagaggatgaccaacttcgacaagaacctgcccaacgagaaggtgctccctaagcactcgctcctgtacgagtacttcaccgtctacaacgagctcacgaaggtgaagtatgtgaccgaggggatgagaaagcctgccttcctgtccggggagcagaagaaggcgatcgtggacctcctgttcaagaccaaccggaaggtcacggttaagcaactcaaggaggactacttcaagaagatcgagtgcttcgattcggtggagatctcaggggtcgaggacaggttcaacgcctccctcgggacctaccacgatctcctgaagatcatcaaggataaggacttcctggacaacgaggagaacgaggacatcctggaggacatcgtgctgaccctcacgctgttcgaggacagggagatgatcgaggagcgcctgaagacgtacgcccatctcttcgatgacaaggtcatgaagcaactcaagagaagaagatacaccgggtgggggaggctgtcccgcaagctcatcaacgggatccgggacaagcagtcagggaagaccatcctcgacttcctgaagtctgatgggttcgccaacaggaacttcatgcaactgatccacgatgactcactcaccttcaaggaggatatccaaaaggctcaggtgagcgggcagggggactcgctgcacgagcatatcgctaacctcgctgggtcccctgcgatcaagaaggggatcctgcagaccgtgaaggttgtggacgagctcgtgaaggtcatggggcggcataagcctgagaacatcgtcatcgagatggccagagagaaccaaaccacgcagaaggggcaaaagaactctagggagcgcatgaagcgcatcgaggaggggatcaaggagctggggtcccaaatcctcaaggagcacccagttgagaacacccaactgcagaacgagaagctctacctgtactacctccagaacgggagggatatgtatgtggaccaagagctggatatcaaccgcctcagcgattacgacgttgatcatatcgtgccccagtctttcctgaaggatgactccatcgacaacaaggtcctcaccaggtcggacaagaaccgcgggaagtcagataacgttccatctgaggaggtcgttaagaagatgaagaactactggaggcagctcctgaacgccaagctgatcacgcaaaggaagttcgacaacctcaccaaggctgagagaggggggctctcagagctggacaaggctgggttcatcaagcggcagctggtcgagaccagacaaatcacgaagcacgttgcgcaaatcctcgactctcggatgaacacgaagtacgatgagaacgacaagctgatcagggaggtgaaggtcatcaccctgaagtctaagctcgtctccgacttccgcaaggacttccagttctacaaggttcgcgagatcaacaactaccaccatgcgcatgacgcttacctcaacgctgtggtcgggaccgccctgatcaagaagtacccgaagctggagagcgagttcgtgtacggggactacaaggtttacgatgtgcgcaagatgatcgccaagtcggagcaagagatcgggaaggccaccgccaagtacttcttctactcaaacatcatgaacttctttaagaccgagatcacgctggccaacggggagatccggaagagacccctcatcgagaccaacggggagacgggggagatcgtgtgggacaaggggagggatttcgcgaccgtccgcaaggttctctccatgccccaggtgaacatcgtcaagaagaccgaggtccaaacgggggggttctcaaaggagtctatcctgcctaagcggaacagcgacaagctcatcgccagaaagaaggactgggatccaaagaagtacggggggttcgacagccctaccgtcgcgtactcggttctggttgtggctaaggttgagaaggggaagtccaagaagctcaagagcgtgaaggagctcctggggatcaccatcatggagcgctccagcttcgagaagaacccaatcgacttcctggaggccaaggggtacaaggaggtgaagaaggacctgatcatcaagctcccgaagtactctctcttcgagctggagaacgggaggaagcgcatgctggcttccgctggggagctccaaaaggggaacgagctcgccctgccatccaagtatgtgaacttcctctacctggcgtcccactacgagaagctcaaggggagcccggaggacaacgagcaaaagcagctgttcgtcgagcagcacaagcattacctcgacgagatcatcgagcaaatctccgagttctccaagcgcgtgatcctcgcggacgctaacctggataaggtcctctccgcttacaacaagcaccgggacaagcccatcagagagcaggccgagaacatcatccatctcttcaccctgacgaacctcggggcccctgctgccttcaagtacttcgacaccacgatcgatcggaagagatacaccagcacgaaggaggtcctggacgcgaccctcatccaccaatctatcacggggctgtacgagacgagaatcgacctgtcacaactggggggggacaagaggccggcggcaaccaagaaggcgggccaggccaagaagaagaagtgaaacgatcgttcaaacatttggcaataaagtttcttaagattgaatcctgttgccggtcttgcgatgattatcatataatttctgttgaattacgttaagcatgtaataattaacatgtaatgcatgacgttatttatgagatgggtttttatgattagagtcccgcaattatacatttaatacgcgatagaaaacaaaatatagcgcgcaaactaggataaattatcgcgcgcggtgtcatctatgttactag

SEQ ID NO: 3167 - DNA, 7011 bp, Triticum aestivum
gaccaagcccgttattctgacagttctggtgctcaacacatttatatttatcaaggagcacattgttactcactgctaggagggaatcgaactaggaatattgatcagaggaactacgagagagctgaagataactgccctctagctctcactgatctgggtcgcatagtgagatgcagcccacgtgagttcagcaacggtctagcgctgggcttttaggcccgcatgatcgggcttttgtcgggtggtcgacgtgttcacgattggggagagcaacgcagcagttcctcttagtttagtcccacctcgcctgtccagcagagttctgaccggtttataaactcgcttgctgcatcagacttgtaatttctactaagtgtagatcgagcggagggagtactagataatttttttgtgctctcttaaggtagcggagaccaagcccgttattctgacagttctggtgctcaacacatttatatttatcaaggagcacattgttactcactgctaggagggaatcgaactaggaatattgatcagaggaactacgagagagctgaagataactgccctctagctctcactgatctgggtcgcatagtgagatgcagcccacgtgagttcagcaacggtctagcgctgggcttttaggcccgcatgatcgggcttttgtcgggtggtcgacgtgttcacgattggggagagcaacgcagcagttcctcttagtttagtcccacctcgcctgtccagcagagttctgaccggtttataaactcgcttgctgcatcagacttgtaatttctactaagtgtagattttgagatagctagaaagacaattttttttgtgtggcaaacagctattatgggtattatgggtggagtgcagcgtgacccggtcgtgcccctctctagagataatgagcattgcatgtctaagttataaaaaattaccacatattttttttgtcacacttgtttgaagtgcagtttatctatctttatacatatatttaaactttactctacgaataatataatctatagtactacaataatatcagtgttttagagaatcatataaatgaacagttagacatggtctaaaggacaattgagtattttgacaacaggactctacagttttatctttttagtgtgcatgtgttctcctttttttttgcaaatagcttcacctatataatacttcatccattttattagtacatccatttagggtttagggttaatggtttttatagactaatttttttagtacatctattttattctattttagcctctaaattaagaaaactaaaactctattttagtttttttatttaataatttagatataaaatagaataaaataaagtgactaaaaattaaacaaataccctttaagaaattaaaaaaactaaggaaacatttttcttgtttcgagtagataatgccagcctgttaaacgccgtcgacgagtctaacggacaccaaccagcgaaccagcagcgtcgcgtcgggccaagcgaagcagacggcacggcatctctgtcgctgcctctggacccctctcgagagttccgctccaccgttggacttgctccgctgtcggcatccagaaattgcgtggcggagcggcagacgtgagccggcacggcaggcggcctcctcctcctctcacggcaccggcagctacgggggattcctttcccaccgctccttcgctttcccttcctcgcccgccgtaataaatagacaccccctccacaccctctttccccaacctcgtgttgttcggagcgcacacacacacaaccagatctcccccaaatccacccgtcggcacctccgcttcaaggtacgccgctcgtcctccccccccccccctctctaccttctctagatcggcgttccggtccatggttagggcccggtagttctacttctgttcatgtttgtgttagatccgtgtttgtgttagatccgtgctgctagcgttcgtacacggatgcgacctgtacgtcagacacgttctgattgctaacttgccagtgtttctctttggggaatcctgggatggctctagccgttccgcagacgggatcgatttcatgattttttttgtttcgttgcatagggtttggtttgcccttttcctttatttcaatatatgccgtgcacttgtttgtcgggtcatcttttcatgcttttttttgtcttggttgtgatgatgtggtctggttgggcggtcgttctagatcggagtagaattaattctgtttcaaactacctggtggatttattaattttggatctgtatgtgtgtgccatacatattcatagttacgaattgaagatgatggatggaaatatcgatctaggataggtatacatgttgatgcgggttttactgatgcatatacagagatgctttttgttcgcttggttgtgatgatgtggtgtggttgggcggtcgttcattcgttctagatcggagtagaatactgtttcaaactacctggtgtatttattaattttggaactgtatgtgtgtgtcatacatcttcatagttacgagtttaagatggatggaaatatcgatctaggataggtatacatgttgatgtgggttttactgatgcatatacatgatggcatatgcagcatctattcatatgctctaaccttgagtacctatctattataataaacaagtatgttttataattattttgatcttgatatacttggatgatggcatatgcagcagctatatgtggatttttttagccctgccttcatacgctatttatttgcttggtactgtttcttttgtcgatgctcaccctgttgtttggtgttacttctgcaggtctccaccatgagcaagctggagaagttcaccaactgctactccctgagcaagaccctcaggttcaaggccatcccagtgggcaagacccaagagaacatcgacaacaagaggctgctcgtggaggacgagaagagggccgaggactacaagggcgtgaagaagctcctggaccgctactacctgtccttcatcaacgacgtcctgcactccatcaagctcaagaacctcaacaactacatctccctcttcaggaagaagaccaggaccgagaaggagaacaaggagctggagaacctggagatcaacctccgcaaggagatcgccaaggccttcaagggcaacgagggctacaagtccctcttcaagaaggacatcatcgagaccatcctcccagagttcctcgacgacaaggacgagatcgccctcgtcaactccttcaacggcttcaccaccgccttcaccggcttcttcgacaaccgcgagaatatgttctccgaggaagccaagtccacctccatcgccttcaggtgcatcaacgagaacctcacccgctacatcagcaacatggacatcttcgagaaggtcgacgccatcttcgacaagcacgaggtccaggagatcaaggagaagatcctgaacagcgactacgacgtcgaggacttcttcgagggcgagttcttcaacttcgtgctgacccaagagggcatcgacgtgtacaacgccatcatcggcggcttcgtgaccgagtccggcgagaagatcaagggcctcaacgagtacatcaacctctacaaccagaagaccaagcagaagctcccaaagttcaagccactgtacaagcaagtcctcagcgaccgcgagtccctgagcttctacggcgagggctacacctccgacgaggaagtgctggaggtgttcaggaacaccctcaacaagaactccgagatcttctccagcatcaagaagctggagaaactgttcaagaacttcgacgagtactccagcgccggcatcttcgtgaagaacggcccagccatctccaccatctccaaggacatcttcggcgagtggaacgtcatccgcgacaagtggaacgccgagtacgacgacatccacctgaagaagaaggccgtcgtgaccgagaagtacgaggacgaccgccgcaagagcttcaagaagatcggctccttcagcctggagcaactccaggagtacgccgacgccgacctctccgtcgtggagaagctcaaggagatcatcatccaaaaggtggacgagatctacaaggtgtacggcagctccgagaaactgttcgacgccgacttcgtgctggagaagtccctcaagaagaacgacgccgtggtcgccatcatgaaggacctgctcgactccgtcaagagcttcgagaactacatcaaggccttcttcggcgagggcaaggagaccaacagggacgagtccttctacggcgacttcgtcctcgcctacgacatcctcctgaaggtcgaccacatctacgacgccatcaggaactacgtgacccaaaagccatacagcaaggacaagttcaagctctacttccagaacccacaattcatgggcggctgggacaaggacaaggagaccgactacagggccaccatcctccgctacggcagcaagtactacctggccatcatggacaagaagtacgccaagtgcctccagaagatcgacaaggacgacgtgaacggcaactacgagaagatcaactacaagctgctcccaggcccaaacaagatgctcccaaaggtgttcttctccaagaagtggatggcctactacaacccaagcgaggacatccaaaagatctacaagaacggcaccttcaagaagggcgacatgttcaacctcaacgactgccacaagctcatcgacttcttcaaggactccatcagccgctacccaaagtggagcaacgcctacgacttcaacttctccgagaccgagaagtacaaggacatcgccggcttctacagggaggtcgaggagcaaggctacaaggtgtccttcgagtccgccagcaagaaggaagtggacaagctcgtggaggaaggcaagctgtacatgttccagatctacaacaaggacttctccgacaagagccacggcaccccaaacctccacaccatgtacttcaagctcctgttcgacgagaacaaccacggccaaatcaggctctccggcggcgccgagctgttcatgcgcagggccagcctcaagaaggaggagctcgtcgtgcacccagccaacagcccaatcgccaacaagaacccagacaacccaaagaagaccaccaccctctcctacgacgtgtacaaggacaagaggttcagcgaggaccaatacgagctgcacatcccaatcgccatcaacaagtgcccaaagaatatcttcaagatcaacaccgaggtgcgcgtcctgctcaagcacgacgacaacccatacgtcatcggcatcgacaggggcgagcgcaacctgctctacatcgtggtcgtggacggcaagggcaacatcgtggagcaatacagcctcaacgagatcatcaacaacttcaacggcatcaggatcaagaccgactaccactccctgctcgacaagaaggagaaggagaggttcgaggccaggcaaaactggacctccatcgagaacatcaaggagctgaaggccggctacatctcccaggtggtccacaagatctgcgagctcgtggagaagtacgacgccgtgatcgccctggaggacctcaacagcggcttcaagaacagccgcgtcaaggtggagaagcaagtctaccaaaagttcgagaagatgctgatcgacaagctgaactacatggtggacaagaagtccaacccatgcgccaccggcggcgccctcaagggctaccaaatcaccaacaagttcgagagcttcaagtccatgagcacccaaaacggcttcatcttctacatcccagcctggctcaccagcaagatcgacccatccaccggcttcgtcaacctgctcaagaccaagtacaccagcatcgccgacagcaagaagttcatctccagcttcgaccgcatcatgtatgtgccagaggaagacctcttcgagttcgccctggactacaagaacttctccaggaccgacgccgactacatcaagaagtggaagctctactcctacggcaacaggatccgcatcttcaggaacccaaagaagaacaacgtgttcgactgggaggaagtgtgcctgacctccgcctacaaggagctgttcaacaagtacggcatcaactaccagcaaggcgacatccgcgccctgctctgcgagcagagcgacaaggccttctacagctccttcatggccctgatgagcctcatgctgcaaatgcgcaactccatcaccggccgcaccgacgtggacttcctcatcagcccagtcaagaacagcgacggcatcttctacgactcccgcaactacgaggcccaagagaacgccatcctgccaaagaacgccgacgccaacggcgcctacaacatcgcccgcaaggtgctgtgggccatcggccaattcaagaaggccgaggacgagaagctggacaaggtgaagatcgccatcagcaacaaggagtggctggagtacgcccaaacctccgtgaagcacaagcgcccagccgccaccaagaaggcgggccaagccaagaagaagaagggcagctacccatacgacgtgccagactacgcctacccatacgacgtcccagactacgcctacccatacgacgtgccagactacgcctgaaacgcatccaatccaatatggacgattggacgtggaaggtttcctgtgtcttctacgatataataattggtcgctgtcctgtgtggatgtttcctgtgtcttctacgatatattaatgtacttctgtctgtttcgtttcgtatgtacaatcttccgggtatcgttcatgtatccctttgaataataacaaataaaatcgggtttgtcacggtaatctgaataaccttttattagccaaagtttaaccaaaattacgtattgcacgtaaaaattaagctagtttttggagagccggagacagac

SEQ ID NO: 3168 - DNA, 362 bp, Triticum aestivum
gaccaagcccgttattctgacagttctggtgctcaacacatttatatttatcaaggagcacattgttactcactgctaggagggaatcgaactaggaatattgatcagaggaactacgagagagctgaagataactgccctctagctctcactgatctgggtcgcatagtgagatgcagcccacgtgagttcagcaacggtctagcgctgggcttttaggcccgcatgatcgggcttttgtcgggtggtcgacgtgttcacgattggggagagcaacgcagcagttcctcttagtttagtcccacctcgcctgtccagcagagttctgaccggtttataaactcgcttgctgcatcagactt

SEQ ID NO: 3169 - DNA, 7 bp, Triticum aestivum
ttttttt

SEQ ID NO: 3170 - DNA, 300 bp, Triticum aestivum
gcatccaatccaatatggacgattggacgtggaaggtttcctgtgtcttctacgatataataattggtcgctgtcctgtgtggatgtttcctgtgtcttctacgatatattaatgtacttctgtctgtttcgtttcgtatgtacaatcttccgggtatcgttcatgtatccctttgaataataacaaataaaatcgggtttgtcacggtaatctgaataaccttttattagccaaagtttaaccaaaattacgtattgcacgtaaaaattaagctagtttttggagagccggagacagac

SEQ ID NO: 3171 - DNA, 250 bp, Triticum aestivum
gatcgttcaaacatttggcaataaagtttcttaagattgaatcctgttgccggtcttgcgatgattatcatataatttctgttgaattacgttaagcatgtaataattaacatgtaatgcatgacgttatttatgagatgggtttttatgattagagtcccgcaattatacatttaatacgcgatagaaaacaaaatatagcgcgcaaactaggataaattatcgcgcgcggtgtcatctatgttactag

SEQ ID NO: 3172 - DNA, 48 bp, Triticum aestivum
aagaggccggcggcaaccaagaaggcgggccaggccaagaagaagaag

SEQ ID NO: 3173 - DNA, 51 bp, Triticum aestivum
atggctcctaagaagaagcgcaaggttgggatccacggggttccggcggct

SEQ ID NO: 3174 - DNA, 163 bp, Triticum aestivum
ctccctccgttcctaaataattgtctttctagctatctcaaataaactacaacatacggatgtatgtagacatgttttagagtgtagattcactcattttgttccgtatgtagtcatttgttgaaatctctagagagacaattatttaggaacggagggagta

SEQ ID NO: 3175 - DNA, 44 bp, Triticum aestivum
taatttctactaagtgtagatcgagcggagggagtactagataa

SEQ ID NO: 3176 - DNA, 44 bp, Triticum aestivum
taatttctactaagtgtagatggaacggagggagtattatctag

SEQ ID NO: 3177 - DNA, 44 bp, Triticum aestivum
taatttctactaagtgtagatagatagctagaaagacaattatt

SEQ ID NO: 3178 - DNA, 44 bp, Triticum aestivum
taatttctactaagtgtagattttgagatagctagaaagacaat

SEQ ID NO: 3179 - DNA, 100 bp, Triticum aestivum
tgacaagtatttccgagcgggttttagagctagaaatagcaagttaaaataaggctagtccgttatcaacttgaaaaagtggcaccgagtcggtgctttt

SEQ ID NO: 3180 - DNA, 100 bp, Triticum aestivum
gacaattatttaggaacggagttttagagctagaaatagcaagttaaaataaggctagtccgttatcaacttgaaaaagtggcaccgagtcggtgctttt

SEQ ID NO: 3181 - DNA, 100 bp, Triticum aestivum
agacaattatttaggaacgggttttagagctagaaatagcaagttaaaataaggctagtccgttatcaacttgaaaaagtggcaccgagtcggtgctttt

SEQ ID NO: 3182 - DNA, 100 bp, Triticum aestivum
gaaagacaattatttaggaagttttagagctagaaatagcaagttaaaataaggctagtccgttatcaacttgaaaaagtggcaccgagtcggtgctttt

SEQ ID NO: 3183 - DNA, 100 bp, Triticum aestivum
agctagaaagacaattatttgttttagagctagaaatagcaagttaaaataaggctagtccgttatcaacttgaaaaagtggcaccgagtcggtgctttt

SEQ ID NO: 3184 - DNA, 100 bp, Triticum aestivum
tttcaacaaatgactacatagttttagagctagaaatagcaagttaaaataaggctagtccgttatcaacttgaaaaagtggcaccgagtcggtgctttt

SEQ ID NO: 3185 - DNA, 100 bp, Triticum aestivum
ctctagagagacaattatttgttttagagctagaaatagcaagttaaaataaggctagtccgttatcaacttgaaaaagtggcaccgagtcggtgctttt

SEQ ID NO: 3186 - DNA, 100 bp, Triticum aestivum
gagagacaattatttaggaagttttagagctagaaatagcaagttaaaataaggctagtccgttatcaacttgaaaaagtggcaccgagtcggtgctttt

SEQ ID NO: 3187 - DNA, 71 bp, Triticum aestivum
caaaggcttgacaatgataatgcccccgaatcttgygatagacctcatgcgctagagttgttttcctcaat

SEQ ID NO: 3188 - DNA, 71 bp, Triticum aestivum
gacaaagttgaggtgaacaaaacaggcctacaatcmgctaacttacgtatatccacattagcacacaccac

SEQ ID NO: 3189 - DNA, 71 bp, Triticum aestivum
aaattcgacaagtactatggctatgtctctgaatgyttgtttggttttatttgtctatattgtcgttgtat

SEQ ID NO: 3190 - DNA, 71 bp, Triticum aestivum
atgcaaagtagtactcgtagagagttaacacagacsagtgatttattgggtggtattctacttgatatttg

SEQ ID NO: 3191 - DNA, 201 bp, Triticum aestivum
ataaagaaaagtagaggaagcttatgaataaaatggaaaaggaattcaaaattgccgataaatataaaactcataacaaatctagccacgcaaatgcccgygccgctctgctcgtttgtacatgtctcggtggacaaggaagaacccaacaattgcacaggtcaatcttatccagcaaaacaaggaagcaaaccaaacagg

SEQ ID NO: 3192 - DNA, 80 bp, Triticum aestivum
atgttgcctctcgctagccgctgtcgmacccaatgaataatgttkmtgggttctggctccgagaggatggccggctyccc

SEQ ID NO: 3193 - DNA, 53 bp, Triticum aestivum
gttccttgtgacatgtactcatamacaagagccatatactccccatccttgca

SEQ ID NO: 3194 - DNA, 201 bp, Triticum aestivum
gacataatgtgtaataacagcccataatgcaataaatatcaatataaaagcatgatgcaaaatggacgtatcattgccacgraaaaaatctcacaagatgwgaccatttgatcctcrtaattgttgttctagacccactcctaagtmtaacattctttatgtctatycttcaaatcccgaagagtaatgaaaactatcgaa

SEQ ID NO: 3195 - DNA, 201 bp, Triticum aestivum
ccatgagtacccgctactatcgatctccctcctccctgtaggaggcctacgaacgatgccctcaggtcctgcttcctctcggtagcgatggatccacctgyggttgctctctcaggaaccagtgttggcggcggctcatccggggcgctggatcttggtgatgtgctggaacaactcaacttggaagacgaagaatttgat

SEQ ID NO: 3196 - DNA, 71 bp, Triticum aestivum
gacaatatgattcaccctagatccttcaccttacarttcgaaaaaaataaaagaacaaaagtaatttgaca

SEQ ID NO: 3197 - DNA, 71 bp, Triticum aestivum
acgaagatgaggaaggtcttcatgttgggtttatgrttactaatacttgcttggaatagatgtttttgatc

SEQ ID NO: 3198 - DNA, 121 bp, Triticum aestivum
gttaccccaatatgctccctccttgcacattttcttcagctgcataaaaamcagaataccrcatcagttgcctgaaccttaacgcaggtgcagaaataaggcgacataatttycactaatc

SEQ ID NO: 3199 - DNA, 71 bp, Triticum aestivum
aggaaaataaattgttcacaacatggacatgagaayggggcaaccaaaaagggaagaacattggaggaaac

SEQ ID NO: 3200 - DNA, 71 bp, Triticum aestivum
tttgtactgcacgtagtaagtattgatttttctgtktgctctctgtggacttagatttgaaaattggcctt

SEQ ID NO: 3201 - DNA, 71 bp, Triticum aestivum
atgcacattgtttccatgttaagcttatattgtgcrtaactcaaaagattgaaatggaattaccaaagggc

SEQ ID NO: 3202 - DNA, 71 bp, Triticum aestivum
actgactgttggaatctgattaagacgctggagaayccgagccaagatatgtcacgactaggccatctgga

SEQ ID NO: 3203 - DNA, 71 bp, Triticum aestivum
aatcagatcctgttaatgctgtagccattcttgcargcgacaccttgtcccagtcgtcttatgggcactta

SEQ ID NO: 3204 - DNA, 101 bp, Triticum aestivum
ggcagagccggtcgacggagaggagcgccattcgacgcgtcttccgcaatrtgtttgcctgcttcggccgcggccattcggcgagctcccacgcttcgtcc

SEQ ID NO: 3205 - DNA, 71 bp, Triticum aestivum
cgtttaaaagaacacaaatgtggccctagtgatcargtacacatatttgtcacctctttgaatcttactta

SEQ ID NO: 3206 - DNA, 108 bp, Triticum aestivum
cgggctgatgaggctctcgacgtgctgcttcacaggatgcctgagctgggctgcacycccaacgtggtggcatataccacggtcatccacggcttctttaaggaaggc

SEQ ID NO: 3207 - DNA, 106 bp, Triticum aestivum
gcgctatccggcgtcgtgttccctcttgggggaatcgtcctggagatggatccggtcaraggggcccgtgatttgtgaggatgtgtgtgttgtttcccgaaaggcg

SEQ ID NO: 3208 - DNA, 110 bp, Triticum aestivum
ctttgaccttaaattcttgtactaatttagcagaatcgttcttcgagaagcactcmaaaaatggtttgtcttgggtctgtatcatattttctctgaacaaacaggcgtga

SEQ ID NO: 3209 - DNA, 106 bp, Triticum aestivum
gacttagcctcacacggaatcgagtcaaccaattccygtcggttttgagtggctcccttgaagatgcaatcgttttcagcatggtcagattaatcagcgagcgtgc

SEQ ID NO: 3210 - DNA, 113 bp, Triticum aestivum
catgtagtggctggcgtctaagcgccttttcttcttccagcatctaygacttagcctcacacggaatcgagtcaaccaattcctgtcggttttgagtggctcccttgaagatg

SEQ ID NO: 3211 - DNA, 88 bp, Triticum aestivum
gtcgtatatattgtttgtattaaaaagttgtgtgttttgmgtcataatttttaaaatattattatgtcattttcaaattcgcatcaac

SEQ ID NO: 3212 - DNA, 97 bp, Triticum aestivum
aatcttcttgacttcatccatccgccttgttgccctgcgcaaaatcaaactyccccgtccttatcatcaagtcaggtcccgccctgggcagagagag

SEQ ID NO: 3213 - DNA, 73 bp, Triticum aestivum
cggcagatatcacaaagggctatcctggtgaacaayaagatgggtcagaatttgataatgaagcctcaagccc

SEQ ID NO: 3214 - DNA, 201 bp, Triticum aestivum
aatagatgcacgcatcggcgaccattttttagtactttttgccttttttgaaaattttgtcattaaaagacaaatgcctagtctatacctgataaactaawatcatacatagagaaaatggtcatttggttgagtttcggtacatgctgagatggttgcacttcggtgcatctgctttgcttccatcacatcataatgtct

SEQ ID NO: 3215 - DNA, 65 bp, Triticum aestivum
gctgcttgtagcgtcccccatggcacctgygaagaggttttcggccacagagaaggggaaggctc

SEQ ID NO: 3216 - DNA, 201 bp, Triticum aestivum
aaaattacttttcacgcgcttcgttggtctgacagtgcgagcataattttactttttctcagttttacttaatttggttaaccaaatcctttttgattttkaactagaaaaccgaatgtcaaacattgtgcaaatttggaaactgaaactgaaaccaaaaacctaaaaaaatgattagtttgtttttttgttcttgtttcg

SEQ ID NO: 3217 - DNA, 66 bp, Triticum aestivum
gtatttcttaggattttctcaccggcatctccrttttttgagcaagagtatttaaggatggtaggc

SEQ ID NO: 3218 - DNA, 201 bp, Triticum aestivum
aacaaagatgctagtaagaacatgaacctagttgctcatttttaacaacaattgcccaccaacctgacatgctcttcccatgttctttttttgctcaaaayagagatgctagtccaaatatttttctagttgcttacattttaaacaacaattgcctaccatccttaaatactcttgctcaaaaaacggagatgccggtga

SEQ ID NO: 3219 - DNA, 60 bp, Triticum aestivum
aatacagactgggtgcaaagccaagatgatwgtaaaattgattgatggccgttgggaggt

SEQ ID NO: 3220 - DNA, 201 bp, Triticum aestivum
tgtaaagaagcttaaccaggaaagctatcagggccatagggaatggctggttagtgacaattttgcctgctggaaatgggatttcttgtttatttcagttytgcattgtgtctgacatgctctttcttttgggcgcaggctgaagtgaattaccttggacaactatcgcacccgaatcttgtaaagctcgttgggtactgt

SEQ ID NO: 3221 - DNA, 87 bp, Triticum aestivum
tggcggagctggggctgttcctcctacgcaggcgaaacttcgccgcgataaayggaactatcatcaggttccccgatgatccatacg

SEQ ID NO: 3222 - DNA, 81 bp, Triticum aestivum
acaagcaaccgagacaagttgctcttaattatctgtgcgtrcacctctaagtcttaacctgacgtaaccaaccaaccgtgt

SEQ ID NO: 3223 - DNA, 90 bp, Triticum aestivum
gatggttacaaggcatgcatagcaagtagagttaacttatcaagttattrgtatttttcttctgtggtacttagagtctamagcttgagc

SEQ ID NO: 3224 - DNA, 201 bp, Triticum aestivum
aatggaagctgatgtgcgttagcgataaagcaacagcgataacgacgcatggatcaccatgctacttggggaagcagggacatctgatgagccagcatacmcccagatatgtgtctttccaaattccacgtcccaacagatgagctataaattaatgccaccttcctcctacagctaaatactccatccgtttcataatgt

SEQ ID NO: 3225 - DNA, 201 bp, Triticum aestivum
cagaggcattcgtgaattgggcgaaatcagaagcaaggagcagcgatgttcagcgcagaaggcactgggaggggattccagggaggctgcccaccagcccrccatcagatacggaggaggtggatccatggccctacctgtgtcctgcgccgaatctggactgtggtaactacagcgcctgaatctagaggttcagcctgg

SEQ ID NO: 3226 - DNA, 201 bp, Triticum aestivum
gatccatctcccttaataattttgctattggtattgggtatggacatctgaagtgaaggttacggccgatttataggagtgatagcaccacacaattcatmagagcatctgcaatagatgagtagatgtaaaactacttaacttttacatctccgggcctaaaaacgcatctgtaataagataatgtagatgtaaagaaaa

SEQ ID NO: 3227 - DNA, 101 bp, Triticum aestivum
cgacgacgacgaggatgccgagtttgatgacatggaggattatatcgacgrcgcggactgggacgccgacatgtatgatgatgtgttcgatgtctgaagga

SEQ ID NO: 3228 - DNA, 61 bp, Triticum aestivum
tagccgtaggtcgtagcacatagccgtttaygtaatgcatagttgtccgaaggaatgtttc

SEQ ID NO: 3229 - DNA, 71 bp, Triticum aestivum
taacctggggcttcttttttctccctataatatggrctgcccttttaagaaggaactgcagcgagggtgca

SEQ ID NO: 3230 - DNA, 71 bp, Triticum aestivum
gactacgcgttcctcccggtggtggcgctctaccckttgtgttgcctttctccaagcagttgtgcccttcg

SEQ ID NO: 3231 - DNA, 71 bp, Triticum aestivum
atatctttacaagtcatcgacttacatgcttctttktattatatgcacctatgcagtacttgttaatgggt

SEQ ID NO: 3232 - DNA, 71 bp, Triticum aestivum
gatgatataaccgtagccaaggaagcccagattttsttctgtgtatctataggagcttaattaggaggagg

SEQ ID NO: 3233 - DNA, 71 bp, Triticum aestivum
agtatataaaaaaacaagttgtcacccagatgaatycgaaactatgtcaatgtcgacggtgagtgtggacc

SEQ ID NO: 3234 - DNA, 71 bp, Triticum aestivum
ggacatcggcacatgctttattactgatctgatttkttgactgtttattttaggtttgcctacaccactga

SEQ ID NO: 3235 - DNA, 201 bp, Triticum aestivum
atggttgaatatgtgactgcatttggactcactccttgtttctgcatttcattgaagataagcatggccttatcaagcttcccagatttagcatgtgcatkaatcagtatgttgaagatacgacagtcaggtagaatgcagtatctttccattgaattgaagagattaatcatatcaactaagcatccttcggtggcatac

SEQ ID NO: 3236 - DNA, 71 bp, Triticum aestivum
ggaggcgcctactgtattaaattagctagtgtggcktgtttgaggataatggcacatataccttggcggtg

SEQ ID NO: 3237 - DNA, 71 bp, Triticum aestivum
tccaggcagggggcatcctcgacaatgatttcatckaagctgcatccccattccatcacgacgcggaggct

SEQ ID NO: 3238 - DNA, 71 bp, Triticum aestivum
tgtaagctaactatacatgaagagtgcaggcacackaaaacgttcatcctgaagtacaagagttattttgg

SEQ ID NO: 3239 - DNA, 59 bp, Triticum aestivum
ggagaaaggcgagattttagcacctaacgccgcaamccagatcaaatcgctgtcccttt

SEQ ID NO: 3240 - DNA, 71 bp, Triticum aestivum
aaccttggaagctatcattgcgcacttgaagagcartagtgtggacattcctgtttatgcttggagcttag

SEQ ID NO: 3241 - DNA, 71 bp, Triticum aestivum
cgcaggcagcgggcatgtatcctcgtctgacggatrcccagattattaaactgtcaccctgcacgcctgca

SEQ ID NO: 3242 - DNA, 298 bp, Triticum aestivum
gaggctaatcccgacgtgccacattgagcacgtgtgttcttgctgtggcctggtcgaaagacatgacgcatgcacgtgccccacgcctcacacggcttgggttctcgcctgtccggtgctcgacggaccagtacatatacgcgagcgctcctrgccacctcagttcatcacacttcactgcagtacaaggcctcggctctcggcagactcctcattgctgcttctgctagtgaaaagagagattcttcagcgctgctcctgaaagagataagaaatacgatggcaacaatggtcagag

SEQ ID NO: 3243 - DNA, 150 bp, Triticum aestivum
acttactgcgcgcagacgttgcagctcttcctgcagaagccaggagcttccttggtgcccaccatatagttggggttcttggcacactccccarcggcagcccactgcgagcagaggacattctcgtcctcgcagccgtcaccggagcct

SEQ ID NO: 3244 - DNA, 200 bp, Triticum aestivum
aagcaagctacgcgttgctcaaaaaaaaaaaaagcaagcaagctacgctgatcaaaggctgaatagtccagagttacaggacatggctactctgcagcrcccagcaagcttactacttaggttggtggagaagcagcacccactcgagactcgacaagcaaccttggacgttctactcgccagtgcattgctgctttacc

SEQ ID NO: 3245 - DNA, 71 bp, Triticum aestivum
accagagaaagagaggggaactttgggtatacaccrcattaccctagtgaaagaagaagggggtattatgt

SEQ ID NO: 3246 - DNA, 71 bp, Triticum aestivum
gaagggtccactgagaattaaggatgcattctttcratttggtatatttgttgtaaggaatgaagaatcgg

SEQ ID NO: 3247 - DNA, 200 bp, Triticum aestivum
tttcgtggcgggggatctcgtgccggtcgaggaggtccacctccagcgaattctgcagcaaccaacacaaacaggcccaaatgtccgaattcagagcasagcccgaccgaccgaccgcgaaatcgcgcggcatggcgttggcgtttggcgttggcgagaaggaaaaaggcactctatgcagaccttagcttggttatggc

SEQ ID NO: 3248 - DNA, 71 bp, Triticum aestivum
ttgccaaattcacaccatcattgatctggggtatcstatgcctatgtgatgcctctcacctctttcttccc

SEQ ID NO: 3249 - DNA, 71 bp, Triticum aestivum
ccgtgaaacctgtaaaaagatgtctgtgtgtctagsaaagccctaattttaatcaccccgtacgcccccct

SEQ ID NO: 3250 - DNA, 71 bp, Triticum aestivum
gcagcttcttgtttatatattctcttatcagaagtygggtagaacagctaacgatgtgctgctcatttcct

SEQ ID NO: 3251 - DNA, 71 bp, Triticum aestivum
tgatcttactgataaaatccggttcaaatatataayggtgagaaaaaattaaccagagcgaggcgagacat

SEQ ID NO: 3252 - DNA, 71 bp, Triticum aestivum
gttcatgtacaatgatgtttaacattggaacggtcygggatctgtttgatctatgcccccttcaacgtctt

SEQ ID NO: 3253 - DNA, 46 bp, Triticum aestivum
gaaggtgaccaagttcatgctgtaaaaagatgtctgtgtgtctagc

SEQ ID NO: 3254 - DNA, 46 bp, Triticum aestivum
gaaggtgaccaagttcatgctggtgaacaaaacaggcctacaatca

SEQ ID NO: 3255 - DNA, 47 bp, Triticum aestivum
gaaggtgaccaagttcatgctaatgatgtttaacattggaacggtcc

SEQ ID NO: 3256 - DNA, 39 bp, Triticum aestivum
gaaggtgaccaagttcatgctgtggtggcgctctacccg

SEQ ID NO: 3257 - DNA, 47 bp, Triticum aestivum
gaaggtgaccaagttcatgctaagtcatcgacttacatgcttctttg

SEQ ID NO: 3258 - DNA, 43 bp, Triticum aestivum
gaaggtgaccaagttcatgctagccaaggaagcccagattttc

SEQ ID NO: 3259 - DNA, 44 bp, Triticum aestivum
gaaggtgaccaagttcatgctaggggaactttgggtatacacca

SEQ ID NO: 3260 - DNA, 46 bp, Triticum aestivum
gaaggtgaccaagttcatgctgttaatgctgtagccattcttgcaa

SEQ ID NO: 3261 - DNA, 47 bp, Triticum aestivum
gaaggtgaccaagttcatgcttcagctgcataaaaamcagaatacca

SEQ ID NO: 3262 - DNA, 49 bp, Triticum aestivum
gaaggtgaccaagttcatgctgcacgtagtaagtattgatttttctgtg

SEQ ID NO: 3263 - DNA, 54 bp, Triticum aestivum
gaaggtgaccaagttcatgctcaaattacttttgttcttttatttttttcgaat

SEQ ID NO: 3264 - DNA, 48 bp, Triticum aestivum
gaaggtgaccaagttcatgctaattgttcacaacatggacatgagaac

SEQ ID NO: 3265 - DNA, 51 bp, Triticum aestivum
gaaggtgaccaagttcatgcttactgataaaatccggttcaaatatataac

SEQ ID NO: 3266 - DNA, 49 bp, Triticum aestivum
gaaggtgaccaagttcatgctggcttcttttttctccctataatatgga

SEQ ID NO: 3267 - DNA, 43 bp, Triticum aestivum
gaaggtgaccaagttcatgctgagaggcatcacataggcatag

SEQ ID NO: 3268 - DNA, 54 bp, Triticum aestivum
gaaggtgaccaagttcatgctattcttcattccttacaacaaatataccaaatt

SEQ ID NO: 3269 - DNA, 48 bp, Triticum aestivum
gaaggtgaccaagttcatgctagtagaataccacccaataaatcactg

SEQ ID NO: 3270 - DNA, 41 bp, Triticum aestivum
gaaggtgaccaagttcatgctctagcgcatgaggtctatcg

SEQ ID NO: 3271 - DNA, 43 bp, Triticum aestivum
gaaggtgaccaagttcatgctacatgaagagtgcaggcacacg

SEQ ID NO: 3272 - DNA, 51 bp, Triticum aestivum
gaaggtgaccaagttcatgctattgtttccatgttaagcttatattgtgca

SEQ ID NO: 3273 - DNA, 53 bp, Triticum aestivum
gaaggtgaccaagttcatgctaaaaacatctattccaagcaagtattagtaat

SEQ ID NO: 3274 - DNA, 51 bp, Triticum aestivum
gaaggtgaccaagttcatgcttcttgtttatatattctcttatcagaagtc

SEQ ID NO: 3275 - DNA, 46 bp, Triticum aestivum
gaaggtgaccaagttcatgctgaatctgattaagacgctggagaac

SEQ ID NO: 3276 - DNA, 50 bp, Triticum aestivum
gaaggtgaccaagttcatgctgattcaaagaggtgacaaatatgtgtact

SEQ ID NO: 3277 - DNA, 44 bp, Triticum aestivum
gaaggtgaccaagttcatgctggtcgtagcacatagccgtttac

SEQ ID NO: 3278 - DNA, 45 bp, Triticum aestivum
gaaggtgaccaagttcatgctacggaatcgagtcaaccaattcct

SEQ ID NO: 3279 - DNA, 49 bp, Triticum aestivum
gaaggtgaccaagttcatgctaacaacaattaygaggatcaaatggtca

SEQ ID NO: 3280 - DNA, 43 bp, Triticum aestivum
gaaggtgaccaagttcatgctatctagccacgcaaatgcccgt

SEQ ID NO: 3281 - DNA, 46 bp, Triticum aestivum
gaaggtgaccaagttcatgctaaagagcatgtcagacacaatgcag

SEQ ID NO: 3282 - DNA, 41 bp, Triticum aestivum
gaaggtgaccaagttcatgctggttcctgagagagcaacca

SEQ ID NO: 3283 - DNA, 44 bp, Triticum aestivum
gaaggtgaccaagttcatgctgacatctgatgagccagcataca

SEQ ID NO: 3284 - DNA, 48 bp, Triticum aestivum
gaaggtgaccaagttcatgctatctactcatctattgcagatgctctt

SEQ ID NO: 3285 - DNA, 51 bp, Triticum aestivum
gaaggtgaccaagttcatgctaaatgcctagtctatacctgataaactaaa

SEQ ID NO: 3286 - DNA, 42 bp, Triticum aestivum
gaaggtgaccaagttcatgctacctcctccgtatctgatggc

SEQ ID NO: 3287 - DNA, 53 bp, Triticum aestivum
gaaggtgaccaagttcatgcttaatttggttaaccaaatcctttttgattttt

SEQ ID NO: 3288 - DNA, 43 bp, Triticum aestivum
gaaggtgaccaagttcatgcttcccagatttagcatgtgcatt

SEQ ID NO: 3289 - DNA, 47 bp, Triticum aestivum
gaaggtgaccaagttcatgctactgtattaaattagctagtgtggcg

SEQ ID NO: 3290 - DNA, 48 bp, Triticum aestivum
gaaggtgaccaagttcatgctaaaaacaagttgtcacccagatgaatc

SEQ ID NO: 3291 - DNA, 45 bp, Triticum aestivum
gaaggtgaccaagttcatgctgcatcctcgacaatgatttcatcg

SEQ ID NO: 3292 - DNA, 46 bp, Triticum aestivum
gaaggtgaccaagttcatgctagattttagcacctaacgccgcaaa

SEQ ID NO: 3293 - DNA, 44 bp, Triticum aestivum
gaaggtgaccaagttcatgctgtcgmacccaatgaataatgttt

SEQ ID NO: 3294 - DNA, 45 bp, Triticum aestivum
gaaggtgaccaagttcatgctgttccttgtgacatgtactcataa

SEQ ID NO: 3295 - DNA, 45 bp, Triticum aestivum
gaaggtgaccaagttcatgctactgggtgcaaagccaagatgatt

SEQ ID NO: 3296 - DNA, 44 bp, Triticum aestivum
gaaggtgaccaagttcatgctggcgaaacttcgccgcgataaat

SEQ ID NO: 3297 - DNA, 48 bp, Triticum aestivum
gaaggtgaccaagttcatgctcaagttgctcttaattatctgtgcgta

SEQ ID NO: 3298 - DNA, 40 bp, Triticum aestivum
gaaggtgaccaagttcatgctcgtcccccatggcacctgt

SEQ ID NO: 3299 - DNA, 53 bp, Triticum aestivum
gaaggtgaccaagttcatgctatagcaagtagagttaacttatcaagttatta

SEQ ID NO: 3300 - DNA, 44 bp, Triticum aestivum
gaaggtgaccaagttcatgctggattttctcaccggcatctcca

SEQ ID NO: 3301 - DNA, 47 bp, Triticum aestivum
gaaggtgaccaagttcatgcttcccatgttctttttttgctcaaaac

SEQ ID NO: 3302 - DNA, 54 bp, Triticum aestivum
gaaggtgaccaagttcatgctatattgtttgtattaaaaagttgtgtgttttga

SEQ ID NO: 3303 - DNA, 45 bp, Triticum aestivum
gaaggtgaccaagttcatgctgccttttcttcttccagcatctac

SEQ ID NO: 3304 - DNA, 46 bp, Triticum aestivum
gaaggtgaccaagttcatgctagaatcgttcttcgagaagcactca

SEQ ID NO: 3305 - DNA, 42 bp, Triticum aestivum
gaaggtgaccaagttcatgctcctggagatggatccggtcag

SEQ ID NO: 3306 - DNA, 39 bp, Triticum aestivum
gaaggtgaccaagttcatgctcctgagctgggctgcacc

SEQ ID NO: 3307 - DNA, 44 bp, Triticum aestivum
gaaggtgaccaagttcatgctaaagggctatcctggtgaacaac

SEQ ID NO: 3308 - DNA, 45 bp, Triticum aestivum
gaaggtgaccaagttcatgctgttgccctgcgcaaaatcaaactt

SEQ ID NO: 3309 - DNA, 46 bp, Triticum aestivum
gaaggtgaccaagttcatgctgtactatggctatgtctctgaatgc

SEQ ID NO: 3310 - DNA, 44 bp, Triticum aestivum
gaaggtgaccaagttcatgctcattcgacgcgtcttccgcaata

SEQ ID NO: 3311 - DNA, 47 bp, Triticum aestivum
gaaggtgaccaagttcatgctgatgacatggaggattatatcgacga

SEQ ID NO: 3312 - DNA, 49 bp, Triticum aestivum
gaaggtgaccaagttcatgctgcacatgctttattactgatctgatttg

SEQ ID NO: 3313 - DNA, 44 bp, Triticum aestivum
gaaggtgaccaagttcatgctccaaatgtccgaattcagagcag

SEQ ID NO: 3314 - DNA, 42 bp, Triticum aestivum
gaaggtgaccaagttcatgctacatatacgcgagcgctcctg

SEQ ID NO: 3315 - DNA, 42 bp, Triticum aestivum
gaaggtgaccaagttcatgctggttcttggcacactccccag

SEQ ID NO: 3316 - DNA, 46 bp, Triticum aestivum
gaaggtgaccaagttcatgctaacctaagtagtaagcttgctgggt

SEQ ID NO: 3317 - DNA, 46 bp, Triticum aestivum
gaaggtcggagtcaacggattgtaaaaagatgtctgtgtgtctagg

SEQ ID NO: 3318 - DNA, 45 bp, Triticum aestivum
gaaggtcggagtcaacggattgtgaacaaaacaggcctacaatcc

SEQ ID NO: 3319 - DNA, 48 bp, Triticum aestivum
gaaggtcggagtcaacggattcaatgatgtttaacattggaacggtct

SEQ ID NO: 3320 - DNA, 40 bp, Triticum aestivum
gaaggtcggagtcaacggattggtggtggcgctctaccct

SEQ ID NO: 3321 - DNA, 48 bp, Triticum aestivum
gaaggtcggagtcaacggattcaagtcatcgacttacatgcttctttt

SEQ ID NO: 3322 - DNA, 43 bp, Triticum aestivum
gaaggtcggagtcaacggattagccaaggaagcccagattttg

SEQ ID NO: 3323 - DNA, 43 bp, Triticum aestivum
gaaggtcggagtcaacggattggggaactttgggtatacaccg

SEQ ID NO: 3324 - DNA, 46 bp, Triticum aestivum
gaaggtcggagtcaacggattgttaatgctgtagccattcttgcag

SEQ ID NO: 3325 - DNA, 46 bp, Triticum aestivum
gaaggtcggagtcaacggattcagctgcataaaaamcagaataccg

SEQ ID NO: 3326 - DNA, 49 bp, Triticum aestivum
gaaggtcggagtcaacggattgcacgtagtaagtattgatttttctgtt

SEQ ID NO: 3327 - DNA, 54 bp, Triticum aestivum
gaaggtcggagtcaacggattcaaattacttttgttcttttatttttttcgaac

SEQ ID NO: 3328 - DNA, 51 bp, Triticum aestivum
gaaggtcggagtcaacggattataaattgttcacaacatggacatgagaat

SEQ ID NO: 3329 - DNA, 53 bp, Triticum aestivum
gaaggtcggagtcaacggattcttactgataaaatccggttcaaatatataat

SEQ ID NO: 3330 - DNA, 48 bp, Triticum aestivum
gaaggtcggagtcaacggattgcttcttttttctccctataatatggg

SEQ ID NO: 3331 - DNA, 43 bp, Triticum aestivum
gaaggtcggagtcaacggattgagaggcatcacataggcatac

SEQ ID NO: 3332 - DNA, 51 bp, Triticum aestivum
gaaggtcggagtcaacggattcttcattccttacaacaaatataccaaatc

SEQ ID NO: 3333 - DNA, 48 bp, Triticum aestivum
gaaggtcggagtcaacggattagtagaataccacccaataaatcactc

SEQ ID NO: 3334 - DNA, 45 bp, Triticum aestivum
gaaggtcggagtcaacggattaactctagcgcatgaggtctatca

SEQ ID NO: 3335 - DNA, 45 bp, Triticum aestivum
gaaggtcggagtcaacggattatacatgaagagtgcaggcacact

SEQ ID NO: 3336 - DNA, 48 bp, Triticum aestivum
gaaggtcggagtcaacggattgtttccatgttaagcttatattgtgcg

SEQ ID NO: 3337 - DNA, 51 bp, Triticum aestivum
gaaggtcggagtcaacggattaaacatctattccaagcaagtattagtaac

SEQ ID NO: 3338 - DNA, 53 bp, Triticum aestivum
gaaggtcggagtcaacggattcttcttgtttatatattctcttatcagaagtt

SEQ ID NO: 3339 - DNA, 47 bp, Triticum aestivum
gaaggtcggagtcaacggattggaatctgattaagacgctggagaat

SEQ ID NO: 3340 - DNA, 46 bp, Triticum aestivum
gaaggtcggagtcaacggattcaaagaggtgacaaatatgtgtacc

SEQ ID NO: 3341 - DNA, 45 bp, Triticum aestivum
gaaggtcggagtcaacggattaggtcgtagcacatagccgtttat

SEQ ID NO: 3342 - DNA, 44 bp, Triticum aestivum
gaaggtcggagtcaacggattcggaatcgagtcaaccaattccc

SEQ ID NO: 3343 - DNA, 49 bp, Triticum aestivum
gaaggtcggagtcaacggattaacaacaattaygaggatcaaatggtct

SEQ ID NO: 3344 - DNA, 41 bp, Triticum aestivum
gaaggtcggagtcaacggattctagccacgcaaatgcccgc

SEQ ID NO: 3345 - DNA, 47 bp, Triticum aestivum
gaaggtcggagtcaacggattgaaagagcatgtcagacacaatgcaa

SEQ ID NO: 3346 - DNA, 41 bp, Triticum aestivum
gaaggtcggagtcaacggattggttcctgagagagcaaccg

SEQ ID NO: 3347 - DNA, 44 bp, Triticum aestivum
gaaggtcggagtcaacggattgacatctgatgagccagcatacc

SEQ ID NO: 3348 - DNA, 46 bp, Triticum aestivum
gaaggtcggagtcaacggattctactcatctattgcagatgctctg

SEQ ID NO: 3349 - DNA, 51 bp, Triticum aestivum
gaaggtcggagtcaacggattaaatgcctagtctatacctgataaactaat

SEQ ID NO: 3350 - DNA, 43 bp, Triticum aestivum
gaaggtcggagtcaacggattcacctcctccgtatctgatggt

SEQ ID NO: 3351 - DNA, 52 bp, Triticum aestivum
gaaggtcggagtcaacggattaatttggttaaccaaatcctttttgattttg

SEQ ID NO: 3352 - DNA, 45 bp, Triticum aestivum
gaaggtcggagtcaacggattcttcccagatttagcatgtgcatg

SEQ ID NO: 3353 - DNA, 49 bp, Triticum aestivum
gaaggtcggagtcaacggattctactgtattaaattagctagtgtggct

SEQ ID NO: 3354 - DNA, 50 bp, Triticum aestivum
gaaggtcggagtcaacggattaaaaaaacaagttgtcacccagatgaatt

SEQ ID NO: 3355 - DNA, 46 bp, Triticum aestivum
gaaggtcggagtcaacggattggcatcctcgacaatgatttcatct

SEQ ID NO: 3356 - DNA, 41 bp, Triticum aestivum
gaaggtcggagtcaacggattttagcacctaacgccgcaac

SEQ ID NO: 3357 - DNA, 46 bp, Triticum aestivum
gaaggtcggagtcaacggattctgtcgmacccaatgaataatgttc

SEQ ID NO: 3358 - DNA, 45 bp, Triticum aestivum
gaaggtcggagtcaacggattgttccttgtgacatgtactcatac

SEQ ID NO: 3359 - DNA, 45 bp, Triticum aestivum
gaaggtcggagtcaacggattactgggtgcaaagccaagatgata

SEQ ID NO: 3360 - DNA, 43 bp, Triticum aestivum
gaaggtcggagtcaacggattgcgaaacttcgccgcgataaac

SEQ ID NO: 3361 - DNA, 47 bp, Triticum aestivum
gaaggtcggagtcaacggattaagttgctcttaattatctgtgcgtg

SEQ ID NO: 3362 - DNA, 39 bp, Triticum aestivum
gaaggtcggagtcaacggattgtcccccatggcacctgc

SEQ ID NO: 3363 - DNA, 51 bp, Triticum aestivum
gaaggtcggagtcaacggattagcaagtagagttaacttatcaagttattg

SEQ ID NO: 3364 - DNA, 39 bp, Triticum aestivum
gaaggtcggagtcaacggattttctcaccggcatctccg

SEQ ID NO: 3365 - DNA, 49 bp, Triticum aestivum
gaaggtcggagtcaacggattcttcccatgttctttttttgctcaaaat

SEQ ID NO: 3366 - DNA, 54 bp, Triticum aestivum
gaaggtcggagtcaacggattatattgtttgtattaaaaagttgtgtgttttgc

SEQ ID NO: 3367 - DNA, 46 bp, Triticum aestivum
gaaggtcggagtcaacggattcgccttttcttcttccagcatctat

SEQ ID NO: 3368 - DNA, 44 bp, Triticum aestivum
gaaggtcggagtcaacggattaatcgttcttcgagaagcactcc

SEQ ID NO: 3369 - DNA, 42 bp, Triticum aestivum
gaaggtcggagtcaacggattcctggagatggatccggtcaa

SEQ ID NO: 3370 - DNA, 40 bp, Triticum aestivum
gaaggtcggagtcaacggattgcctgagctgggctgcact

SEQ ID NO: 3371 - DNA, 46 bp, Triticum aestivum
gaaggtcggagtcaacggattacaaagggctatcctggtgaacaat

SEQ ID NO: 3372 - DNA, 42 bp, Triticum aestivum
gaaggtcggagtcaacggattgccctgcgcaaaatcaaactc

SEQ ID NO: 3373 - DNA, 48 bp, Triticum aestivum
gaaggtcggagtcaacggattaagtactatggctatgtctctgaatgt

SEQ ID NO: 3374 - DNA, 40 bp, Triticum aestivum
gaaggtcggagtcaacggattcgacgcgtcttccgcaatg

SEQ ID NO: 3375 - DNA, 46 bp, Triticum aestivum
gaaggtcggagtcaacggattatgacatggaggattatatcgacgg

SEQ ID NO: 3376 - DNA, 50 bp, Triticum aestivum
gaaggtcggagtcaacggattggcacatgctttattactgatctgatttt

SEQ ID NO: 3377 - DNA, 44 bp, Triticum aestivum
gaaggtcggagtcaacggattccaaatgtccgaattcagagcac

SEQ ID NO: 3378 - DNA, 44 bp, Triticum aestivum
gaaggtcggagtcaacggattgtacatatacgcgagcgctccta

SEQ ID NO: 3379 - DNA, 42 bp, Triticum aestivum
gaaggtcggagtcaacggattggttcttggcacactccccaa

SEQ ID NO: 3380 - DNA, 44 bp, Triticum aestivum
gaaggtcggagtcaacggattcctaagtagtaagcttgctgggc

SEQ ID NO: 3381 - DNA, 19 bp, Triticum aestivum
aggggggcgtacggggtga

SEQ ID NO: 3382 - DNA, 29 bp, Triticum aestivum
gtgtgtgctaatgtggatatacgtaagtt

SEQ ID NO: 3383 - DNA, 25 bp, Triticum aestivum
gacgttgaagggggcatagatcaaa

SEQ ID NO: 3384 - DNA, 26 bp, Triticum aestivum
caactgcttggagaaaggcaacacaa

SEQ ID NO: 3385 - DNA, 29 bp, Triticum aestivum
ccattaacaagtactgcataggtgcatat

SEQ ID NO: 3386 - DNA, 28 bp, Triticum aestivum
cctcctcctaattaagctcctatagata

SEQ ID NO: 3387 - DNA, 25 bp, Triticum aestivum
cccccttcttctttcactagggtaa

SEQ ID NO: 3388 - DNA, 24 bp, Triticum aestivum
gtgcccataagacgactgggacaa

SEQ ID NO: 3389 - DNA, 25 bp, Triticum aestivum
ctgcgttaaggttcaggcaactgat

SEQ ID NO: 3390 - DNA, 29 bp, Triticum aestivum
gccaattttcaaatctaagtccacagaga

SEQ ID NO: 3391 - DNA, 29 bp, Triticum aestivum
atatgattcaccctagatccttcacctta

SEQ ID NO: 3392 - DNA, 21 bp, Triticum aestivum
gtttcctccaatgttcttccc

SEQ ID NO: 3393 - DNA, 25 bp, Triticum aestivum
tgtctcgcctcgctctggttaattt

SEQ ID NO: 3394 - DNA, 25 bp, Triticum aestivum
accctcgctgcagttccttcttaaa

SEQ ID NO: 3395 - DNA, 29 bp, Triticum aestivum
aaattcacaccatcattgatctggggtat

SEQ ID NO: 3396 - DNA, 29 bp, Triticum aestivum
gtccactgagaattaaggatgcattcttt

SEQ ID NO: 3397 - DNA, 29 bp, Triticum aestivum
aagtagtactcgtagagagttaacacaga

SEQ ID NO: 3398 - DNA, 25 bp, Triticum aestivum
gcttgacaatgataatgcccccgaa

SEQ ID NO: 3399 - DNA, 30 bp, Triticum aestivum
aataactcttgtacttcaggatgaacgttt

SEQ ID NO: 3400 - DNA, 29 bp, Triticum aestivum
gccctttggtaattccatttcaatctttt

SEQ ID NO: 3401 - DNA, 26 bp, Triticum aestivum
gatgaggaaggtcttcatgttgggtt

SEQ ID NO: 3402 - DNA, 25 bp, Triticum aestivum
gagcagcacatcgttagctgttcta

SEQ ID NO: 3403 - DNA, 26 bp, Triticum aestivum
cagatggcctagtcgtgacatatctt

SEQ ID NO: 3404 - DNA, 29 bp, Triticum aestivum
taaaagaacacaaatgtggccctagtgat

SEQ ID NO: 3405 - DNA, 29 bp, Triticum aestivum
gaaacattccttcggacaactatgcatta

SEQ ID NO: 3406 - DNA, 25 bp, Triticum aestivum
gcatcttcaagggagccactcaaaa

SEQ ID NO: 3407 - DNA, 30 bp, Triticum aestivum
atcattgccacgraaaaaatctcacaagat

SEQ ID NO: 3408 - DNA, 25 bp, Triticum aestivum
ccttgtccaccgagacatgtacaaa

SEQ ID NO: 3409 - DNA, 29 bp, Triticum aestivum
cctgctggaaatgggatttcttgtttatt

SEQ ID NO: 3410 - DNA, 23 bp, Triticum aestivum
gcttcctctcggtagcgatggat

SEQ ID NO: 3411 - DNA, 26 bp, Triticum aestivum
gggacgtggaatttggaaagacacat

SEQ ID NO: 3412 - DNA, 29 bp, Triticum aestivum
tataggagtgatagcaccacacaattcat

SEQ ID NO: 3413 - DNA, 29 bp, Triticum aestivum
tgtaccgaaactcaaccaaatgaccattt

SEQ ID NO: 3414 - DNA, 22 bp, Triticum aestivum
cagaaggcactgggaggggatt

SEQ ID NO: 3415 - DNA, 30 bp, Triticum aestivum
gcacaatgtttgacattcggttttctagtt

SEQ ID NO: 3416 - DNA, 29 bp, Triticum aestivum
ctgactgtcgtatcttcaacatactgatt

SEQ ID NO: 3417 - DNA, 28 bp, Triticum aestivum
ccaaggtatatgtgccattatcctcaaa

SEQ ID NO: 3418 - DNA, 26 bp, Triticum aestivum
cactcaccgtcgacattgacatagtt

SEQ ID NO: 3419 - DNA, 22 bp, Triticum aestivum
agcctccgcgtcgtgatggaat

SEQ ID NO: 3420 - DNA, 23 bp, Triticum aestivum
aaagggacagcgatttgatctgg

SEQ ID NO: 3421 - DNA, 21 bp, Triticum aestivum
gccatcctctcggagccagaa

SEQ ID NO: 3422 - DNA, 25 bp, Triticum aestivum
caaggatggggagtatatggctctt

SEQ ID NO: 3423 - DNA, 25 bp, Triticum aestivum
cctcccaacggccatcaatcaattt

SEQ ID NO: 3424 - DNA, 26 bp, Triticum aestivum
gatcatcggggaacctgatgatagtt

SEQ ID NO: 3425 - DNA, 28 bp, Triticum aestivum
ttggttggttacgtcaggttaagactta

SEQ ID NO: 3426 - DNA, 24 bp, Triticum aestivum
cttctctgtggccgaaaacctctt

SEQ ID NO: 3427 - DNA, 28 bp, Triticum aestivum
gctktagactctaagtaccacagaagaa

SEQ ID NO: 3428 - DNA, 29 bp, Triticum aestivum
cctaccatccttaaatactcttgctcaaa

SEQ ID NO: 3429 - DNA, 30 bp, Triticum aestivum
aagcaactagaaaaatatttggactagcat

SEQ ID NO: 3430 - DNA, 30 bp, Triticum aestivum
gttgatgcgaatttgaaaatgacataataa

SEQ ID NO: 3431 - DNA, 25 bp, Triticum aestivum
ttgactcgattccgtgtgaggctaa

SEQ ID NO: 3432 - DNA, 30 bp, Triticum aestivum
aatatgatacagacccaagacaaaccattt

SEQ ID NO: 3433 - DNA, 22 bp, Triticum aestivum
tcctcacaaatcacgggcccct

SEQ ID NO: 3434 - DNA, 24 bp, Triticum aestivum
gaccgtggtatatgccaccacgtt

SEQ ID NO: 3435 - DNA, 29 bp, Triticum aestivum
ggcttcattatcaaattctgacccatctt

SEQ ID NO: 3436 - DNA, 22 bp, Triticum aestivum
gggcgggacctgacttgatgat

SEQ ID NO: 3437 - DNA, 30 bp, Triticum aestivum
acgacaatatagacaaataaaaccaaacaa

SEQ ID NO: 3438 - DNA, 19 bp, Triticum aestivum
ccgcggccgaagcaggcaa

SEQ ID NO: 3439 - DNA, 22 bp, Triticum aestivum
atacatgtcggcgtcccagtcc

SEQ ID NO: 3440 - DNA, 30 bp, Triticum aestivum
ggtgtaggcaaacctaaaataaacagtcaa

SEQ ID NO: 3441 - DNA, 22 bp, Triticum aestivum
caacgccaaacgccaacgccat

SEQ ID NO: 3442 - DNA, 25 bp, Triticum aestivum
gccttgtactgcagtgaagtgtgat

SEQ ID NO: 3443 - DNA, 22 bp, Triticum aestivum
tgacggctgcgaggacgagaat

SEQ ID NO: 3444 - DNA, 25 bp, Triticum aestivum
agtccagagttacaggacatggcta

SEQ ID NO: 3445 - DNA, 71 bp, Triticum aestivum
aagtctgccatccagatcattacccaacggccaatggagccatgaggtttgcctcgttgcacgttttggct

SEQ ID NO: 3446 - DNA, 71 bp, Triticum aestivum
gcaacaaagctggtcatccaaacatttacatcgttaggcaggctttccgcccaaaccatgcggccgacctg

SEQ ID NO: 3447 - DNA, 71 bp, Triticum aestivum
tatgtaaaacctctttgtttctaaatagctgcggctcgctacctaaatttatgttgaacctagaggcaccc

SEQ ID NO: 3448 - DNA, 71 bp, Triticum aestivum
gttcggcagaatccaagtcgcaaatgtaaggtcagcaaatgaatgatgatcatgataatgaaaatcataag

SEQ ID NO: 3449 - DNA, 71 bp, Triticum aestivum
acgtatggagcttcctcttttcatcatgcaccattgtgatctccctcttattttgtctgaagccattcatg

SEQ ID NO: 3450 - DNA, 71 bp, Triticum aestivum
aggtcatgaaaatgcaagtggcgaatcttatctctgttataccatttggcaaaacaaaggcgagagttctg

SEQ ID NO: 3451 - DNA, 71 bp, Triticum aestivum
aagtctgccatccagatcattacccaacggccaattgagccatgaggtttgcctcgttgcacgttttggct

SEQ ID NO: 3452 - DNA, 71 bp, Triticum aestivum
gcaacaaagctggtcatccaaacatttacatcgttcggcaggctttccgcccaaaccatgcggccgacctg

SEQ ID NO: 3453 - DNA, 71 bp, Triticum aestivum
tatgtaaaacctctttgtttctaaatagctgcggcccgctacctaaatttatgttgaacctagaggcaccc

SEQ ID NO: 3454 - DNA, 71 bp, Triticum aestivum
gttcggcagaatccaagtcgcaaatgtaaggtcagaaaatgaatgatgatcatgataatgaaaatcataag

SEQ ID NO: 3455 - DNA, 71 bp, Triticum aestivum
acgtatggagcttcctcttttcatcatgcaccattatgatctccctcttattttgtctgaagccattcatg

SEQ ID NO: 3456 - DNA, 71 bp, Triticum aestivum
aggtcatgaaaatgcaagtggcgaatcttatctctattataccatttggcaaaacaaaggcgagagttctg

SEQ ID NO: 3457 - DNA, 3983 bp, Triticum aestivum
aaataaagccagggactggggaatgagaagataatgtttataaggggttttctgtaaaaagaaagagcaacctacgcggcccctctgtcgatttggcatgggtcaacgcaccacacgagcaggtcaacgagcgctcgtgagaaaaaggacctagggtaaatcacttactaaagaattaggacctaaaggtgcattttggacgaaataagactaaagtgacaccctgacgaattttttaggaccttgagtgcatttaactctttcaaaaaataaagatgctaaaaaaactaaatgcttaaaaatacatttttctatgggaatacttaaaaatactagtataatttgatggcttcctagtatatttctagggcttacaactaaatttatattcttggtctaaataaaattataatctgataaattatgtgatatgaatatagccatatgagaccataatttaattttacctgcaaaaagtaagtaatagtagtagtagtactacgtactccctccgtccggaaatacttgtcgaagaatttgatgaaaatggatgcatctagaacaagaatacatctagatacatcaatctccccgacaagtatttccgaacggagggagtactagataataagataactaccctaaaaaaaaaagataactgaaggttgccacctagcacattcacattggtacaacttggaaaagcacagccccgtcgtcctgctcccagttgagttcgcgacctacacagcggccatgccccgcttctcctccaccacgccaatgtcgccaccccgcctccgcctccgactctgcgcccgccactcctcctgcacctctcatccctcacgcatctgggatccccacgccgccttcgccgccgcggcacagcgggcgagctctggcacgctcactacggaggacgcacaccacctgtttgacgaattgctgcggcggggcaatcctgtccaggagcgtcccttgaataaatttctggctgccctcgcccgcgcgcccgcgtccgcatcctgctgcgatggccccgccctggcagtcgccctcttcggccgtttgtcccaagacgtcagacgacgggtggcgcagccaaatgtcttcacctatggcgtcctcatggactgctgctgccgcgcttgccgcacagatctggcgctcgccttctttggccgtctcctcaagacgggcctggaggcaaaccaagtcgtcttcaacaccctcctcaagggcctttgccacacaaagcgggcggatgaggctctggacgtgctgcttcacaggatgcctgagctgggctgcactcctgatgtggtggcgtataacaccgttatccatggcttctttaaggaaggccatgtaagcaaggcctgcaatctgttccatgaaatggcgcagcagggcgttaagcctaatgtggtgacatataactcagttatcgatgcgctgtgcaaggccagagccatggacaaggcagaggtggtccttcgtcagatgattgatgatggtgttggaccttaatgtgacgtatagtagcctcatccatggatattcctcttcaggccactggaaggaggcagttagggtattcaaagagatgacaagtcggagggttacagcagatgtgcatacttacaacatgtttatgacctttctttgcaaacatggaagaagcaaagaagctgcaggaatttttgataccatggctatcaagggcctgaaacctgacaacgtttcatatgctattctccttcatgggtatgccgccgaaggatgcttagttgatatgattaatctcttcaattcaatggaaagagattgtattctacctgactgtcgtatcttcaacatactgattaatgcatatgctaaatctgggaagcttgataaggctatgcttatcttcaatgaaatgcagaaacaaggagtgagtccaaatgcagtcacatattcaaccgtaatacatgcattttgcaagaagggtaggttggatgatgctgtgataaagtttaatcagatgattgatacaggagtacgaccggacgcatctgtttatcgtcccctaatccagggtttttgtacacatggcgatttggtgaaagcaaaggaatatgttactgaaatgatgaagaaaggtatgcctcctcctgatattatgttcttcagttcaatcatgcagaacctatgcacagaaggaagggtaacagaagcacgggatatccttgacttgatagtgcacattggtatgaggcctaatgttatcatatttaatttgctgatcggtggatactgcctagtccgcaagatggcagatgcattgaaagtatttgatgatatggtgtcatatggtttagaaccttgtaactttacgtatggtatacttattaatggctattgcaaaaatagaaggattgatgacgggcttattctgttcaaagagatgctgcacaagggacttaaacctacaacttttaattataacgtcatactggatggattatttctggctggacaaactgttgctgcaaaagagaagtttgatgagatggttgaatctggagtaagtgtgtgcattgatacatactctataattcttggtggactttgtagaaatagctgcagtagcgaagcgatcacccttttccggaaattaagcgcaatgaatgtgaaatttgatattacaattgtcaatatcattattggtgccttatacagggtcgagagaaaccaagaggctaaggatttgtttgctgctatgccagccaatggcttggttcctaatgctgttacctacaccgtaatgatgacaaatcttataaaagaaggttcagtggaagaagctgacaatcttttcttatccatggagaagagcggctgtactgccaactcttgcctgttaaatcatatcatcagaaggttactggaaaaaggagagatagtcaaggctggaaattatatgtctaaagttgatgcaaagagctactcacttgaagctaaaactgtttcgctgctgatctctctgttttcaaggaaagggaaatatagagaacacatcaaattgcttcctacaaagtatcagtttctggaagaagcagccacagttgaatagttggtacatgatatctgaaatttaatttgcatcgcttgccatgggtccgtctgcttgtacaagaaatgcattttctatttgtaaataggaagtcagtttagaacaagccatcaggatgacgcaaagagtacaattcagttgcaccaccaataaaaaggcagaactagggctgccaaaacaacactgaatcaaaactcaaacagaaggagcagcaaactttttttttttgaagctggacagtctgctagccaaacaactacaggagactgtcaggcggggcatgtagtggctggcgtctaagcgcctttgcttcttccaccatccatggcttagcctcacacggaatcgagtcaaccaattcccgtcggttttgggtggctcccttgaagatgcaattgttttcagcggccagatacgcatggtcagattaatcagcgagtgtgccccttctgtctggttcgagaaagaatttgaagagctgagcttgtccccgctggaaccagtttgaggttagttaatcataacagggtactagagaggtgttttattgactgttgatgtgtaatatgttatatgccatcctcttgatgattacggtgatctgtgaagaggcaggatgcaaaagtgtgaatcacatatgcttatgtaattgtgttattatttgtgcagcttctagaccttttgcctgtagatggctacatggatctagttgtagcaatctgtaactgttagtgttttgtatatgctggcattgatgattagggtgacttgtgaagcatgcagaagtctgaatcatacatgcttgtctacttatttttggaactctctctttgccatgtacatgttttatgaatgcagttgt

1. An isolated Rf1 nucleic acid encoding a Rf1 protein restorer of fertility of T. timopheevii CMS cytoplasm, wherein the corresponding amino acid sequence has at least 95% identity to SEQ ID NO:361.

2. The isolated nucleic acid according to claim 1, comprising SEQ ID NO:3119.

3. A transgenic wheat plant comprising a Rf1 nucleic acid according to claim 1.

4. A genetically engineered wheat plant comprising a Rf1 nucleic acid according to claim 1.

5. The wheat plant according to claim 3, wherein said transgenic element(s) or genetically engineered element(s) express polypeptides which restore or improve male fertility to the plant as compared to the parent plant without such transgenic element(s) or genetically engineered element(s).

6. A wheat plant restorer of fertility of T. timopheevii CMS cytoplasm comprising a Rf1 restorer allele according to claim 1, and at least two fertility restorer alleles within the restorer loci chosen amongst Rf3, Rf4 and Rf7, wherein,
i. the Rf3 locus is located at most 10 cM from marker cfn1249269 of SEQ ID NO:3205 or marker BS00090770 of SEQ ID NO:3228,
ii. the Rf7 locus is located at most 10 cM from marker cfn0919993 of SEQ ID NO:3231, and,
iii. the Rf4 locus is located at most 10 cM from marker cfn0393953 of SEQ ID NO:3233.

7. The wheat plant according to claim 3, wherein the plant comprises Rf1, Rf3 and Rf7 restorer alleles.

8. The wheat plant according to claim 3, wherein it includes at least one Rf3 restorer allele within the Rf3 locus, said Rf3 restorer allele being located within the chromosomal fragment between SNP markers cfn1249269 and BS00090770.

9. The wheat plant according to claim 8, wherein the corresponding Amino acid sequence of Rf3 restorer allele has at least 95% identity to an amino acid selected from the group consisting of SEQ ID NO: 158, SEQ ID NO: 676 and SEQ ID NO:684.

10. The wheat plant according to claim 8, wherein said Rf3 locus comprises SEQ ID NO:1712, SEQ ID NO:3147 or SEQ ID NO:2230, SEQ ID NO:3148 or SEQ ID NO:2238.

11. The wheat plant of according to claim 3, wherein it includes at least one Rf7 restorer allele within the Rf7 locus, said Rf7 locus comprises the presence of one or more of the following restorer SNP allele(s):

| SNP# | Marker Name | Marker SEQ ID | Restorer Allele |
|---|---|---|---|
| SNP44 | cfn0917304 | 3230 | T |
| SNP45 | cfn0919993 | 3231 | G |
| SNP46 | cfn0920459 | 3232 | C |
| SNP49 | cfn0915987 | 3445 | G |
| SNP50 | cfn0920253 | 3446 | A |
| SNP51 | cfn0448874 | 3447 | T |
| SNP52 | cfn0923814 | 3448 | C |
| SNP53 | cfn0924180 | 3449 | G |
| SNP54 | cfn0919484 | 3450 | G |

12. The wheat plant according to claim 3, wherein it includes at least one Rf4 restorer allele encoding a Rf4 protein restorer of fertility of T. timopheevii CMS cytoplasm, wherein the corresponding amino acid sequence has at least 95% identity to an amino acid selected from the group consisting of SEQ ID NO:477 and SEQ ID NOs3136-3138.

13. The wheat plant according to claim 3, comprising Rf1, Rf3 and Rf7 restorer alleles at the same locus.

14. A method for producing a transgenic wheat plant according to claim 3, wherein the method comprises the steps of transforming a parent wheat plant with one or more nucleic acids encoding protein restorer of T. timopheevii CMS cytoplasm, selecting a plant comprising said one or more nucleic acid(s) as transgene(s), regenerating and growing said wheat transgenic plant.

15. A method for producing a genetically modified wheat plant according to claim 4, wherein the method comprises the steps of genetically modifying a parent wheat plant to obtain in their genome one or more nucleotide sequence encoding protein restorer of T timopheevii CMS cytoplasm.

16. A method for producing the wheat plant according to claim 6, said method includes the following step:
a. providing a first wheat plant comprising one or two restorer allele selected among Rf1, Rf3 and Rf7 restorer alleles,
b. crossing said first wheat plant with a second wheat plant comprising one or two restorer alleles selected among Rf1, Rf3 and Rf7 restorer alleles, wherein Rf1, Rf3 and Rf7 restorer alleles are represented at least once in the panel of restorer alleles provided by the first plant and the second plant,
c. collecting the F1 hybrid seed,
d. obtaining homozygous plants from the F1 plants.

17. The method according to claim 14, wherein the fertility score of the obtained wheat plant has a fertility score higher than the parent wheat plant.

18. A method for producing a transgenic or genetically engineered wheat plant, wherein the fertility level of said plant is modified comprising the step of knocking-down Rf1 restorer allele expression, wherein said Rf1 restorer allele comprises a nucleic acid according to claim 1.

19. A method for modifying fertility level in a wheat plant by genome editing, comprising providing a genome editing tool capable of modulating Rf1 restorer allele expression, wherein Rf1 restorer allele comprises a nucleotide sequence as defined in claim 1.

20. A method for producing a wheat hybrid plant comprising the steps of:
a. crossing a sterile female comprising the T. timopheevii cytoplasm with a fertile male wheat plant according to claim 3;
b. collecting the hybrid seed.

21. The method according to claim 20, further comprising the step of detecting the presence of T. timopheevii cytoplasm, and/or at least three of Rf locus chosen amongst Rf1, Rf3, Rf4 and Rf7 in the hybrid seeds.

22. A wheat hybrid plant as obtained by the method according to claim 20.

23. A method of identifying a wheat plant according to claim 3, wherein said wheat plant is identified by detecting the presence of at least one restorer allele Rf1.

24. A nucleic acid probe or primer for the specific detection of the restorer allele Rf1 in a wheat plant.

25. A recombinant nucleic acid comprising a nucleic acid encoding a protein restorer of T. timopheevii CMS cytoplasm according to claim 1, operably linked to regulatory elements.

26. (canceled)

27. The isolated Rf1 nucleic acid according to claim 1, wherein the corresponding amino acid sequence has at least 98% to SEQ ID NO:361.

28. The isolated Rf1 nucleic acid according to claim 1, wherein the corresponding amino acid sequence has 100% to SEQ ID NO:361.

29. The transgenic wheat plant according to claim 3, wherein it further comprises nucleic acid comprising Rf3, Rf4 and/or Rf7 restorer allele(s), as transgenic element(s).

30. The genetically engineered wheat plant according to claim 4, wherein it further comprises nucleic acids comprising Rf3, Rf4 and/or Rf7 restorer allele(s), as genetically engineered element(s).

31. The wheat plant of claim 9, wherein the corresponding amino acid sequence of Rf3 restorer allele has at least 98% identity to an amino acid selected from the group consisting of SEQ ID NO: 158, SEQ ID NO: 676 and SEQ ID NO:684.

32. The wheat plant of claim 9, wherein the corresponding amino acid sequence of Rf3 restorer allele has 100% identity to an amino acid selected from the group consisting of SEQ ID NO: 158, SEQ ID NO: 676 and SEQ ID NO:684.

33. The wheat plant according to claim 12, wherein it includes at least one Rf4 restorer allele encoding a Rf4 protein restorer of fertility of T. timopheevii CMS cytoplasm, and wherein the corresponding amino acid sequence has at least 98% identity to an amino acid selected from the group consisting of SEQ ID NO:477 and SEQ ID Nos:3136-3138.

34. The wheat plant according to claim 12, wherein it includes at least one Rf4 restorer allele encoding a Rf4 protein restorer of fertility of T. timopheevii CMS cytoplasm, and wherein the corresponding amino acid sequence has 100% identity to an amino acid selected from the group consisting of SEQ ID NO:477 and SEQ ID Nos:3136-3138.

35. The method according to claim 16, said method further includes a step e) of detecting the presence of the Rf1, Rf3 and Rf7 restorer alleles in the hybrid seed and/or at each generation.

36. The method according to claim 20, said method further comprises a step c) of detecting hybridity level of the hybrid seeds.

37. The method according to claim 23, wherein said wheat plant is identified by further detecting one or more restorer alleles selected from the group consisting of Rf3, Rf4 and Rf7.
